(19) United States
(12) Patent Application Publication
(10) Pub. No.: US 2006/0269917 A1
(43) Pub. Date: Nov. 30, 2006

(54) Compositions, splice variants and methods relating to colon specific gene and proteins

(76) Inventors: Roberto A. Macina, San Jose, CA (US); Leah R. Turner, Sunnyvale, CA (US); Yongming Sun, Redwood City, CA (US); Maria Rodriquez, Minneapolis, MN (US)

Correspondence Address: LICATA & TYRRELL P.C., 66 E. MAIN STREET, MARLTON, NJ, 08053, US

(21) Appl. No.: 10/537,121

(22) PCT Filed: Dec. 4, 2003
(86) PCT No.: PCT/US03/40131

§ 371 Date: Jun. 15, 2006

Related U.S. Application Data
(60) Provisional application No. 60/431,143, filed on Dec. 4, 2002.
(60) Provisional application No. 60/431,206, filed on Dec. 4, 2002.

(51) Int. Cl. C12Q 1/68; G01N 33/574; C07H 21/04; C12P 21/06; C07K 14/82; C07K 16/30; A61K 38/17; A61K 48/00

(52) U.S. Cl. 435/6; 435/7.23; 435/69.1; 435/320.1; 435/325; 530/350; 530/388.8; 514/12; 514/44; 536/23.5

(57) ABSTRACT

The present invention relates to newly identified nucleic acid molecules and polypeptides present in normal and neoplastic colon cells, including fragments, variants and derivatives of the nucleic acids and polypeptides. The present invention also relates to antibodies to the polypeptides of the invention, as well as agonists and antagonists of the polypeptides of the invention. The invention also relates to compositions containing the nucleic acid molecules, polypeptides, antibodies, agonists and antagonists of the invention and methods for the use of these compositions. These uses include identifying, diagnosing, monitoring, staging, imaging and treating colon cancer and non-cancerous disease states in colon, identifying colon tissue, monitoring and identifying and/or designing agonists and antagonists of polypeptides of the invention. The uses also include gene therapy, production of transgenic animals and cells, and production of engineered colon tissue for treatment and research.

[0001] This application claims the benefit of priority from U.S. Provisional Patent Application Ser. No. 60/431,143 filed Dec. 4, 2002 and 60/431,206 filed Dec. 4, 2002, which are herein incorporated by reference in their entireties.

### FIELD OF THE INVENTION

[0002] The present invention relates to newly identified nucleic acids and polypeptides present in normal and neoplastic colon cells, including fragments, variants and derivatives of the nucleic acids and polypeptides. The present invention also relates to antibodies to the polypeptides of the invention, as well as agonists and antagonists of the polypeptides of the invention. The invention also relates to compositions comprising the nucleic acids, polypeptides, antibodies, post translational modifications (PTMs), variants, derivatives, agonists and antagonists thereof and methods for the use of these compositions. These uses include identifying, diagnosing, monitoring, staging, imagine and treating colon cancer and/or non-cancerous disease states in colon, identifying colon tissue and monitoring and identifying and/or designing agonists and antagonists of polypeptides of the invention. The uses also include gene therapy, therapeutic molecules including but not limited to antibodies or antisense molecules, production of transgenic animals and cells, and production of engineered colon tissue for treatment and research.

### BACKGROUND OF THE INVENTION

[0003] Colorectal cancer is the second most common cause of cancer death in the United States and the third most prevalent cancer in both men and women. M. L. Davila & A. D. Davila, Screening for Colon and Rectal Cancer; in Colon and Rectal Cancer 47 (Peter S. Edelstein ed., 2000). The American Cancer Society estimates that there will be about 105,500 new cases of colon cancer and 42,000 new cases of rectal cancer in 2003 in the United States. Colon cancer and rectal cancer will cause about 57,100 deaths combined. ACS Website: cancer.org on the world wide web. Nearly all cases of colorectal cancer arise from adenomatous polyps, some of which mature into large polyps, undergo abnormal growth and development, and ultimately progress into cancer. Davila at 55-56. This progression would appear to take at least 10 years in most patients, rendering it a readily treatable form of cancer if diagnosed early, when the cancer is localized. Davila at 56; Walter J. Burdette, Cancer: Etiology, Diagnosis, and Treatment 125 (1998).

[0004] Although our understanding of the etiology of colon cancer is undergoing continual refinement, extensive research in this area points to a combination of factors, including age, hereditary and nonhereditary conditions, and environmental/dietary factors. Age is a key risk factor in the development of colorectal cancer, Davila at 48, with men and women over 40 years of age becoming increasingly susceptible to that cancer, Burdette at 126. Incidence rates increase considerably in each subsequent decade of life. Davila at 48. A number of hereditary and nonhereditary conditions have also been linked to a heightened risk of developing colorectal cancer, including familial adenomatous polyposis (FAP), hereditary nonpolyposis colorectal cancer (Lynch syndrome or HNPCC), a personal and/or family history of colorectal cancer or adenomatous polyps, inflammatory bowel disease, diabetes mellitus, and obesity. Davila at 47; Henry T. Lynch & Jane F. Lynch, Hereditary Nonpolyposis Colorectal Cancer (Lynch Syndromes), in Colon and Rectal Cancer 67-68 (Peter S. Edelstein ed., 2000).

[0005] Environmental/dietary factors associated with an increased risk of colorectal cancer include a high fat diet, intake of high dietary red meat, and sedentary lifestyle. Davila at 47; Reddy, B. S., Prev. Med. 16(4): 460-7 (1987). Conversely, environmental/dietary factors associated with a reduced risk of colorectal cancer include a diet high in fiber, folic acid, calcium, and hormone-replacement therapy in post-menopausal women. Davila at 50-55. The effect of antioxidants in reducing the risk of colon cancer is unclear. Davila at 53.

[0006] Because colon cancer is highly treatable when detected at an early, localized stage, screening should be a part of routine care for all adults starting at age 50, especially those with first-degree relatives with colorectal cancer. One major advantage of colorectal cancer screening over its counterparts in other types of cancer is its ability to not only detect precancerous lesions, but to remove them as well. Davila at 56. The key colorectal cancer screening tests in use today are fecal occult blood test, sigmoidoscopy, colonoscopy, double-contrast barium enema, and the carcinoembryonic antigen (CEA) test. Burdette at 125; Davila at 56.

[0007] The fecal occult blood test (FOBT) screens for colorectal cancer by detecting the amount of blood in the stool, the premise being that neoplastic tissue, particularly malignant tissue, bleeds more than typical mucosa, with the amount of bleeding increasing with polyp size and cancer stage. Davila at 56-57. While effective at detecting early stage tumors, FOBT is unable to detect adenomatous polyps (premalignant lesions), and, depending on the contents of the fecal sample, is subject to rendering false positives. Davila at 56-59. Sigmoidoscopy and colonoscopy, by contrast, allow direct visualization of the bowel, and enable one to detect, biopsy, and remove adenomatous polyps. Davila at 59-60, 61. Despite the advantages of these procedures, there are accompanying downsides: sigmoidoscopy, by definition, is limited to the sigmoid colon and below, colonoscopy is a relatively expensive procedure, and both share the risk of possible bowel perforation and hemorrhaging. Davila at 59-60. Double-contrast barium enema (DCBE) enables detection of lesions better than FOBT, and almost as well a colonoscopy, but it may be limited in evaluating the winding rectosigmoid region. Davila at 60. The CEA blood test, which involves screening the blood for carcinoembryonic antigen, shares the downside of FOBT, in that it is of limited utility in detecting colorectal cancer at an early stage. Burdette at 125.

[0008] Once colon cancer has been diagnosed, treatment decisions are typically made in reference to the stage of cancer progression. A number of techniques are employed to stage the cancer (some of which are also used to screen for colon cancer), including pathologic examination of resected colon, sigmoidoscopy, colonoscopy, and various imaging techniques. AJCC Cancer Staging Handbook 84 (Irvin D. Fleming et al. eds., 5^{th} ed. 1998); Montgomery, R. C. and Ridge, J. A., Semin. Surg. Oncol. 15(3): 143-150 (1998). Moreover, chest films, liver functionality tests, and liver scans are employed to determine the extent of metastasis. Fleming at 84. While computerized tomography and magnetic resonance imaging are useful in staging colorectal cancer in its later stages, both have unacceptably low staging accuracy for identifying early stages of the disease, due to the difficulty that both methods have in (1) revealing the depth of bowel wall tumor infiltration and (2) diagnosing malignant adenopathy. Thoeni, R. F., Radiol. Clin. N. Am. 35(2): 457-85 (1997). Rather, techniques such as transrectal ultrasound (TRUS) are preferred in this context, although this technique is inaccurate with respect to detecting small lymph nodes that may contain metastases. David Blumberg & Frank G. Opelka, Neoadjuvant and Adjuvant Therapy for Adenocarcinoma of the Rectum, in Colon and Rectal Cancer 316 (Peter S. Edelstein ed., 2000).

[0009] Several classification systems have been devised to stage the extent of colorectal cancer, including the Dukes' system and the more detailed International Union against Cancer-American Joint Committee on Cancer TNM staging system, which is considered by many in the field to be a more useful staging system. Burdette at 126-27. The TNM system, which is used for either clinical or pathological staging, is divided into four stages, each of which evaluates the extent of cancer growth with respect to primary tumor (T), regional lymph nodes (N), and distant metastasis (M). Fleming at 84-85. The system focuses on the extent of tumor invasion into the intestinal wall, invasion of adjacent structures, the number of regional lymph nodes that have been affected, and whether distant metastasis has occurred. Fleming at 81.

[0010] Stage 0 is characterized by in situ carcinoma (Tis), in which the cancer cells are located inside the glandular basement membrane (intraepithelial) or lamina propria (intramucosal). In this stage, the cancer has not spread to the regional lymph nodes (N0), and there is no distant metastasis (M0). In stage I, there is still no spread of the cancer to the regional lymph nodes and no distant metastasis, but the tumor has invaded the submucosa (T1) or has progressed further to invade the muscularis propria (T2). Stage II also involves no spread of the cancer to the regional lymph nodes and no distant metastasis, but the tumor has invaded the subserosa, or the nonperitonealized pericolic or perirectal tissues (T3), or has progressed to invade other organs or structures, and/or has perforated the visceral peritoneum (T4). Stage III is characterized by any of the T substages, no distant metastasis, and either metastasis in 1 to 3 regional lymph nodes (N1) or metastasis in four or more regional lymph nodes (2). Lastly, stage IV involves any of the T or N substages, as well as distant metastasis. Fleming at 84-85; Burdette at 127.

[0011] Currently, pathological staging of colon cancer is preferable over clinical staging as pathological staging provides a more accurate prognosis. Pathological staging typically involves examination of the resected colon section, along with surgical examination of the abdominal cavity. Fleming at 84. Clinical staging would be a preferred method of staging were it at least as accurate as pathological staging, as it does not depend on the invasive procedures of its counterpart.

[0012] Turning to the treatment of colorectal cancer, surgical resection results in a cure for roughly 50% of patients. Irradiation is used both preoperatively and postoperatively in treating colorectal cancer. Chemotherapeutic agents, particularly 5-fluorouracil, are also powerful weapons in treating colorectal cancer. Other agents include irinotecan and floxuridine, cisplatin, levamisole, methotrexate, interferon-α, and leucovorin. Burdette at 125, 132-33. Nonetheless, thirty to forty percent of patients will develop a recurrence of colon cancer following surgical resection, which in many patients is the ultimate cause of death. Wayne De Vos, Follow-up After Treatment of Colon Cancer, Colon and Rectal Cancer 225 (Peter S. Edelstein ed., 2000). Accordingly, colon cancer patients must be closely monitored to determine response to therapy and to detect persistent or recurrent disease and metastasis.

[0013] The next few paragraphs describe the some of molecular bases of colon cancer. In the case of FAP, the tumor suppressor gene APC (adenomatous polyposis coli), chromosomally located at 5q21, has been either inactivated or deleted by mutation. Alberts et al., Molecular Biology of the Cell 1288 (3d ed. 1994). The APC protein plays a role in a number of functions, including cell adhesion, apoptosis, and repression of the c-myc oncogene. N. R. Hall & R. D. Madoff, Genetics and the Polyp-Cancer Sequence, Colon and Rectal Cancer 8 (Peter S. Edelstein, ed., 2000). Of those patients with colorectal cancer who have normal APC genes, over 65% have such mutations in the cancer cells but not in other tissues. Alberts et al., supra at 1288. In the case of HPNCC, patients manifest abnormalities in the tumor suppressor gene HNPCC, but only about 15% of tumors contain the mutated gene. Id. A host of other genes have also been implicated in colorectal cancer, including the K-ras, N-ras, H-ras and C-myc oncogenes, and the tumor suppressor genes DCC (deleted in colon carcinoma) and p53. Hall & Madoff, at 8-9; Alberts et al., at 1288.

[0014] Abnormalities in Wg/Wnt signal transduction pathway are also associated with the development of colorectal carcinoma. Taipale, J. and Beachy, P. A. Nature 411: 349-354 (2001). Wnt1 is a secreted protein gene originally identified within mouse mammary cancers by its insertion into the mouse mammary tumor virus (MMTV) gene. The protein is homologous to the wingless (Wg) gene product of Drosophila, in which it functions as an important factor for the determination of dorsal-ventral segmentation and regulates the formation of fly imaginal discs. Wg/Wnt pathway controls cell proliferation, death and differentiation. Taipal ('001). There are at least 13 members in the Wnt family. These proteins have been found expressed mainly in the central nervous system (CNS) of vertebrates as well as other tissues such as mammary and intestine. The Wnt proteins are the ligands for a family of seven transmembrane domain receptors related to the Frizzled gene product in Drosophila. Binding Wnt to Frizzled stimulates the activity of the downstream target, Dishevelled, which in turn inactivates the glycogen synthesase kinase 3β (GSK3β). Taipal (2001). Usually active GSK3β will form a complex with the adenomatous polyposis coli (APC) protein and phosphorylate another complex member, β-catenin. Once phosphorylated, β-catenin is directed to degradation through the ubiquitin pathway. When GSK3β or APC activity is down regulated, β-catenin is accumulated in the cytoplasm and binds to the T-cell factor or lymphocyte excitation factor (Tcf/Lef) family of transcriptional factors. Binding of β-catenin to Tcf releases the transcriptional repression and induces gene transcription. Among the genes regulated by β-catenin are a transcriptional repressor Engrailed, a transforming growth factor-β (TGF-β) family member Decapentaplegic, and the cytokine Hedgehog in Drosophila. β-Catenin is also involved in regulating cell adhesion by binding to α-catenin and E-cadherin. On the other hand, binding of β-catenin to these proteins controls the cytoplasmic β-catenin level and its complexing with TCF. Taipal (2001). Growth factor stimulation and activation of c-src or v-src also regulate β-catenin level by phosphorylation of α-catenin and its related protein, p120^{cas}. When phosphorylated, these proteins decrease their binding to E-cadherin and β-catenin resulting in the accumulation of cytoplasmic β-catenin. Reynolds, A. B. et al. Mol. Cell Biol. 14: 8333-8342 (1994). In colon cancer, c-src enzymatic activity has been shown to be increased to the level of v-src. Alternation of components in the Wg/Wnt pathway promotes colorectal carcinoma development. The best known modifications are to the APC gene. Nicola S et al. Hum. Mol. Genet 10:721-733 (2001). This germline mutation causes the appearance of hundreds to thousands of adenomatous polyps in the large bowel. It is the gene defect that accounts for the autosomally dominantly inherited FAP and related syndromes. The molecular alternations that occur in this pathway largely involve deletions of alleles of tumor-suppressor genes, such as APC, p53 and Deleted in Colorectal Cancer (DCC), combined with mutational activation of proto-oncogenes, especially c-Ki-ras. Aoki, T. et al. Human Mutat. 3: 342-346 (1994). All of these lead to genomic instability in colorectal cancers.

[0015] Another source of genomic instability in colorectal cancer is the defect of DNA mismatch repair (MMR) genes. Human homologues of the bacterial mutHLS complex (hMSH2, hMLH1, hPMS1, hPMS2 and hMSH6), which is involved in the DNA mismatch repair in bacteria, have been shown to cause the HNPCC (about 70-90% HNPCC) when mutated. Modrich, P. and Lahue, R. Ann Rev. Biochem. 65: 101-133 (1996); and Peltomäki, P. Hum. Mol. Genet 10: 735-740 (2001). The inactivation of these proteins leads to the accumulation of mutations and causes genetic instability that represents errors in the accurate replication of the repetitive mono-, di-, tri- and tetra-nucleotide repeats, which are scattered throughout the genome (microsatellite regions). Jass, J. R. et al. J. Gastroenterol Hepatol 17: 17-26 (2002). Like in the classic FAP, mutational activation of c-Ki-ras is also required for the promotion of MSI in the alternative HNPCC. Mutations in other proteins such as the tumor suppressor protein phosphatase PTEN (Zhou, X. P. et al. Hum. Mol. Genet 11: 445-450 (2002)), BAX (Buttler, L. M. Aus. N. Z. J. Surg. 69: 88-94 (1999)), Caspase-5 (Planck, M. Cancer Genet Cytogenet. 134: 46-54 (2002)), TGFβ-RII (Fallik, D. et al. Gastroenterol Clin Biol. 24: 917-22 (2000)) and IGFII-R (Giovannucci E. J. Nutr. 131: 3109S-20S (2001)) have also been found in some colorectal tumors possibly as the cause of MMR defect.

[0016] Some tyrosine kinases have been shown up-regulated in colorectal tumor tissues or cell lines like HT29. Skoudy, A. et al. Biochem J. 317 (Pt 1): 279-84 (1996). Focal adhesion kinase (FAK) and its up-stream kinase c-src and c-yes in colonic epithelial cells may play an important role in the promotion of colorectal cancers through the extracellular matrix (ECM) and integrin-mediated signaling pathways. Jessup, J. M. et al., The molecular biology of colorectal carcinoma, in: The Molecular Basis of Human Cancer, 251-268 (Coleman W. B. and Tsongalis G. J. Eds. 2002). The formation of c-src/FAK complexes may coordinately deregulate VEGF expression and apoptosis inhibition. Recent evidences suggest that a specific signal-transduction pathway for cell survival that implicates integrin engagement leads to FAK activation and thus activates PI-3 kinase and akt. In turn, akt phosphorylates BAD and blocks apoptosis in epithelial cells. The activation of c-src in colon cancer may induce VEGF expression through the hypoxia pathway. Other genes that may be implicated in colorectal cancer include Cox enzymes (Ota, S. et al. Aliment Pharmacol. Ther. 16 (Suppl 2): 102-106 (2002)), estrogen (al-Azzawi, F. and Wahab, M. Climacteric 5: 3-14 (2002)), peroxisome proliferator-activated receptor-γ (PPAR-γ) (Gelman, L. et al. Cell Mol. Life Sci. 55: 932-943 (1999)), IGF-I (Giovannucci (2001)), thymine DNA glycosylase (TDG) (Hardeland, U. et al. Prog. Nucleic Acid Res. Mol. Biol. 68: 235-253 (2001)) and EGF (Mendelsohn, J. Endocrine-Related Cancer 8: 3-9 (2001)).

[0017] Gene deletion and mutation are not the only causes for development of colorectal cancers. Epigenetic silencing by DNA methylation also accounts for the loss of function of colorectal cancer suppressor genes. A strong association between MSI and CpG island methylation has been well characterized in sporadic colorectal cancers with high MSI but not in those of hereditary origin. In one experiment, DNA methylation of MLH1, CDKN2A, MGMT, THBS1, RARB, APC, and p14ARF genes has been shown in 80%, 55%, 23%, 23%, 58%, 35%, and 50% of 40 sporadic colorectal cancers with high MSI respectively. Yamamoto, H. et al. Genes Chromosomes Cancer 33: 322-325 (2002); and Kim, K. M. et al. Oncogene. 12;21(35): 5441-9 (2002). Carcinogen metabolism enzymes such as GST, NAT, CYP and MTHFR are also associated with an increased or decreased colorectal cancer risk. Pistorius, S. et al. Kongressbd Dtsch Ges Chir Kongr 118: 820-824 (2001); and Potter, J. D. J. Natl. Cancer Inst. 91: 916-932 (1999).

[0018] From the foregoing, it is clear that procedures used for detecting, diagnosing, monitoring, staging, prognosticating, and preventing the recurrence of colorectal cancer are of critical importance to the outcome of the patient. Moreover, current procedures, while helpful in each of these analyses, are limited by their specificity, sensitivity, invasiveness, and/or their cost. As such, highly specific and sensitive procedures that would operate by way of detecting novel markers in cells, tissues, or bodily fluids, with minimal invasiveness and at a reasonable cost, would be highly desirable.

[0019] Accordingly, there is a great need for more sensitive and accurate methods for predicting whether a person is likely to develop colorectal cancer, for diagnosing colorectal cancer, for monitoring the progression of the disease, for staging the colorectal cancer, for determining whether the colorectal cancer has metastasized, and for imaging the colorectal cancer. Following accurate diagnosis, there is also a need for less invasive and more effective treatment of colorectal cancer.

[0020] Growth and metastasis of solid tumors are also dependent on angiogenesis. Folkman, J., 1986, Cancer Research, 46, 467-473; Folkman, J., 1989, Journal of the National Cancer Institute, 82, 4-6. It has been shown, for example, that tumors which enlarge to greater than 2 mm must obtain their own blood supply and do so by inducing the growth of new capillary blood vessels. Once these new blood vessels become embedded in the tumor, they provide a means for tumor cells to enter the circulation and metastasize to distant sites such as liver, lung or bone. Weidner, N., et al., 1991, The New England Journal of Medicine, 324(1), 1-8.

[0021] Angiogenesis, defined as the growth or sprouting of new blood vessels from existing vessels, is a complex process that primarily occurs during embryonic development. The process is distinct from vasculogenesis, in that the new endothelial cells lining the vessel arise from proliferation of existing cells, rather than differentiating from stem cells. The process is invasive and dependent upon proteolyisis of the extracellular matrix (ECM), migration of new endothelial cells, and synthesis of new matrix components. Angiogenesis occurs during embryogenic development of the circulatory system; however, in adult humans, angiogenesis only occurs as a response to a pathological condition (except during the reproductive cycle in women).

[0022] Under normal physiological conditions in adults, angiogenesis takes place only in very restricted situations such as hair growth and wounding healing. Auerbach, W. and Auerbach, R., 1994, Pharmacol Ther. 63(3):265-3 11; Ribatti et al., 1991, Haematologica 76(4):3 11-20; Risau, 1997, Nature 386(6626):67 1-4. Angiogenesis progresses by a stimulus which results in the formation of a migrating column of endothelial cells. Proteolytic activity is focused at the advancing tip of this “vascular sprout”, which breaks down the ECM sufficiently to permit the column of cells to infiltrate and migrate. Behind the advancing front, the endothelial cells differentiate and begin to adhere to each other, thus forming a new basement membrane. The cells then cease proliferation and finally define a lumen for the new arteriole or capillary.

[0023] Unregulated angiogenesis has gradually been recognized to be responsible for a wide range of disorders, including, but not limited to, cancer, cardiovascular disease, rheumatoid arthritis, psoriasis and diabetic retinopathy. Folkman, 1995, Nat Med 1(1):27-31; Isner, 1999, Circulation 99(13): 1653-5; Koch, 1998, Arthritis Rheum 41(6):951-62; Walsh, 1999, Rheumatology (Oxford) 38(2):103-12; Ware and Simons, 1997, Nat Med 3(2): 158-64.

[0024] Of particular interest is the observation that angiogenesis is required by solid tumors for their growth and metastases. Folkman, 1986 supra; Folkman 1990, J Natl. Cancer Inst., 82(1) 4-6; Folkman, 1992, Semin Cancer Biol 3(2):65-71; Zetter, 1998, Annu Rev Med 49:407-24. A tumor usually begins as a single aberrant cell which can proliferate only to a size of a few cubic millimeters due to the distance from available capillary beds, and it can stay ‘dormant’ without further growth and dissemination for a long period of time. Some tumor cells then switch to the angiogenic phenotype to activate endothelial cells, which proliferate and mature into new capillary blood vessels. These newly formed blood vessels not only allow for continued growth of the primary tumor, but also for the dissemination and recolonization of metastatic tumor cells. The precise mechanisms that control the angiogenic switch is not well understood, but it is believed that neovascularization of tumor mass results from the net balance of a multitude of angiogenesis stimulators and inhibitors Folkman, 1995, supra.

[0025] One of the most potent angiogenesis inhibitors is endostatin identified by O'Reilly and Folkman. O'Reilly et al., 1997, Cell 88(2):277-85; O'Reilly et al., 1994, Cell 79(2):3 15-28. Its discovery was based on the phenomenon that certain primary tumors can inhibit the growth of distant metastases. O'Reilly and Folkman hypothesized that a primary tumor initiates angiogenesis by generating angiogenic stimulators in excess of inhibitors. However, angiogenic inhibitors, by virtue of their longer half life in the circulation, reach the site of a secondary tumor in excess of the stimulators. The net result is the growth of primary tumor and inhibition of secondary tumor. Endostatin is one of a growing list of such angiogenesis inhibitors produced by primary tumors. It is a proteolytic fragment of a larger protein: endostatin is a 20 kDa fragment of collagen XVIII (amino acid H1132-K1315 in murine collagen XVIII). Endostatin has been shown to specifically inhibit endothelial cell proliferation in vitro and block angiogenesis in vivo. More importantly, administration of endostatin to tumor-bearing mice leads to significant tumor regression, and no toxicity or drug resistance has been observed even after multiple treatment cycles. Boehm et al., 1997, Nature 390(6658):404-407. The fact that endostatin targets genetically stable endothelial cells and inhibits a variety of solid tumors makes it a very attractive candidate for anticancer therapy. Fidler and Ellis, 1994, Cell 79(2):185-8; Gastl et al., 1997, Oncology 54(3):177-84; Hinsbergh et al., 1999, Ann Oncol 10 Suppl 4:60-3. In addition, angiogenesis inhibitors have been shown to be more effective when combined with radiation and chemotherapeutic agents. Klement, 2000, J. Clin Invest, 105(8) R15-24. Browder, 2000, Cancer Res. 6-(7) 1878-86, Arap et al., 1998, Science 279(5349):377-80; Mauceri et al., 1998, Nature 394(6690):287-91.

### SUMMARY OF THE INVENTION

[0026] The present invention solves many needs in the art by providing nucleic acid molecules, polypeptides and antibodies thereto, variants and derivatives of the nucleic acids and polypeptides, and agonists and antagonists thereto that may be used to identify, diagnose, monitor, stage, image and treat colon cancer and/or non-cancerous disease states in colon; identify and monitor colon tissue; and identify and design agonists and antagonists of polypeptides of the invention. The invention also provides gene therapy, methods for producing transgenic animals and cells, and methods for producing engineered colon tissue for treatment and research.

[0027] One aspect of the present invention relates to nucleic acid molecules that are specific to colon cells, colon tissue and/or the colon organ. These colon specific nucleic acids (CSNAs) may be a naturally occurring cDNA, genomic DNA, RNA, or a fragment of one of these nucleic acids, or may be a non-naturally occurring nucleic acid molecule. If the CSNA is genomic DNA, then the CSNA is a colon specific gene (CSG). If the CSNA is RNA, then it is a colon specific transcript encoded by a CSG. Due to alternative splicing and transcriptional modification one CSG may encode for multiple colon specific RNAs. In a preferred embodiment, the nucleic acid molecule encodes a polypeptide that is specific to colon. More preferred is a nucleic acid molecule that encodes a polypeptide comprising an amino acid sequence of SEQ ID NO: 113-259. In another preferred embodiment, the nucleic acid molecule comprises a nucleic acid sequence of SEQ ID NO: 1-112. For the CSNA sequences listed herein, DEX0449_{—}001.nt.1 corresponds to SEQ ID NO: 1. For sequences with multiple splice variants, the parent sequence DEX0449_{—}001.nt.1, sill be followed by DEX0449_{—}001.nt.2, etc. for each splice variant. The sequences off the corresponding peptides are listed as DEX0449_{—}001.aa.1, etc. For the mapping of all of the nucleotides and peptides, see the table in the Example 1 section below.

[0028] This aspect of the present invention also relates to nucleic acid molecules that selectively hybridize or exhibit substantial sequence similarity to nucleic acid molecules encoding a Colon Specific Protein (CSP), or that selectively hybridize or exhibit substantial sequence similarity to a CSNA. In one embodiment of the present invention the nucleic acid molecule comprises an allelic variant of a nucleic acid molecule encoding a CSP, or an allelic variant of a CSNA. In another embodiment, the nucleic acid molecule comprises a part of a nucleic acid sequence that encodes a CSP or a part of a nucleic acid sequence of a CSNA.

[0029] In addition, this aspect of the present invention relates to a nucleic acid molecule further comprising one or more expression control sequences controlling the transcription and/or translation of all or a part of a CSNA or the transcription and/or translation of a nucleic acid molecule that encodes all or a fragment of a CSP.

[0030] Another aspect of the present invention relates to vectors and/or host cells comprising a nucleic acid molecule of this invention. In a preferred embodiment, the nucleic acid molecule of the vector and/or host cell encodes all or a fragment of a CSP. In another preferred embodiment, the nucleic acid molecule of the vector and/or host cell comprises all or a part of a CSNA. Vectors and host cells of the present invention are useful in the recombinant production of polypeptides, particularly CSPs of the present invention.

[0031] Another aspect of the present invention relates to polypeptides encoded by a nucleic acid molecule of this invention. The polypeptide may comprise either a fragment or a full-length protein. In a preferred embodiment, the polypeptide is a CSP. However, this aspect of the present invention also relates to mutant proteins (muteins) of CSPs, fusion proteins of which a portion is a CSP, and proteins and polypeptides encoded by allelic variants of a CSNA as provided herein.

[0032] A further aspect of the present invention is a novel splice variant which encodes an amino acid sequence that provides a novel region to be targeted for the generation of reagents that can be used in the detection and/or treatment of cancer. The novel amino acid sequence may lead to a unique protein structure, protein subcellular localization, biochemical processing or function. This information can be used to directly or indirectly facilitate the generation of additional or novel therapeutics or diagnostics. The nucleotide sequence in this novel splice variant can be used as a nucleic acid probe for the diagnosis and/or treatment of cancer.

[0033] Another aspect of the present invention relates to antibodies and other binders that specifically bind to a polypeptide of the instant invention. Accordingly antibodies or binders of the present invention specifically bind to CSPs, muteins, fusion proteins, and/or homologous proteins or polypeptides encoded by allelic variants of a CSNA as provided herein.

[0034] Another aspect of the present invention relates to agonists and antagonists of the nucleic acid molecules and polypeptides of this invention. The agonists and antagonists of the instant invention may be used to treat colon cancer and non-cancerous disease states in colon and to produce engineered colon tissue.

[0035] Another aspect of the present invention relates to methods for using the nucleic acid molecules to detect or amplify nucleic acid molecules that have similar or identical nucleic acid sequences compared to the nucleic acid molecules described herein. Such methods are useful in identifying, diagnosing, monitoring, staging, imaging and treating colon cancer and/or non-cancerous disease states in colon. Such methods are also useful in identifying and/or monitoring colon tissue. In addition, measurement of levels of one or more of the nucleic acid molecules of this invention may be useful as a diagnostic as part of a panel in combination with known other markers, particularly those described in the colon cancer background section above.

[0036] Another aspect of the present invention relates to use of the nucleic acid molecules of this invention in gene therapy, for producing transgenic animals and cells, and for producing engineered colon tissue for treatment and research.

[0037] Another aspect of the present invention relates to methods for detecting polypeptides of this invention, preferably using antibodies thereto. Such methods are useful to identify, diagnose, monitor, stage, image and treat colon cancer and non-cancerous disease states in colon. In addition, measurement of levels of one or more of the polypeptides of this invention may be useful to identify, diagnose, monitor, stage, and/or image colon cancer in combination with known other markers, particularly those described in the colon cancer background section above. The polypeptides of the present invention can also be used to identify and/or monitor colon tissue, and to produce engineered colon tissue.

[0038] Yet another aspect of the present invention relates to a computer readable means of storing the nucleic acid and amino acid sequences of the invention. The records of the computer readable means can be accessed for reading and displaying of sequences for comparison, alignment and ordering of the sequences of the invention to other sequences. In addition, the computer records regarding the nucleic acid and/or amino acid sequences and/or measurements of their levels may be used alone or in combination with other markers to diagnose colon related diseases.

### DETAILED DESCRIPTION OF THE INVENTION

Definitions and General Techniques

[0039] Unless otherwise defined herein, scientific and technical terms used in connection with the present invention shall have the meanings that are commonly understood by those of ordinary skill in the art. Further, unless otherwise required by context, singular terms shall include pluralities and plural terms shall include the singular. Generally, nomenclatures used in connection with, and techniques of, cell and tissue culture, molecular biology, immunology, microbiology, genetics and protein and nucleic acid chemistry and hybridization described herein are those well known and commonly used in the art. The methods and techniques of the present invention are generally performed according to conventional methods well known in the art and as described in various general and more specific references that are cited and discussed throughout the present specification unless otherwise indicated. See, e.g., Sambrook et al., Molecular Cloning: A Laboratory Manual, 2d ed., Cold Spring Harbor Laboratory Press (1989) and Sambrook et al., Molecular Cloning: A Laboratory Manual, 3d ed., Cold Spring Harbor Press (2001); Ausubel et al., Current Protocols in Molecular Biology, Greene Publishing Associates (1992, and Supplements to 2000); Ausubel et al., Short Protocols in Molecular Biology: A Compendium of Methods from Current Protocols in Molecular Biology—4^{th} Ed., Wiley & Sons (1999); Harlow and Lane, Antibodies: A Laboratory Manual, Cold Spring Harbor Laboratory Press (1990); and Harlow and Lane, Using Antibodies: A Laboratory Manual, Cold Spring Harbor Laboratory Press (1999).

[0040] Enzymatic reactions and purification techniques are performed according to manufacturer's specifications, as commonly accomplished in the art or as described herein. The nomenclatures used in connection with, and the laboratory procedures and techniques of, analytical chemistry, synthetic organic chemistry, and medicinal and pharmaceutical chemistry described herein are those well known and commonly used in the art. Standard techniques are used for chemical syntheses, chemical analyses, pharmaceutical preparation, formulation, and delivery, and treatment of patients.

[0041] The following terms, unless otherwise indicated, shall be understood to have the following meanings:

[0042] A “nucleic acid molecule” of this invention refers to a polymeric form of nucleotides and includes both sense and antisense strands of RNA, cDNA, genomic DNA, and synthetic forms and mixed polymers of the above. A nucleotide refers to a ribonucleotide, deoxynucleotide or a modified form of either type of nucleotide. A “nucleic acid molecule” as used herein is synonymous with “nucleic acid” and “polynucleotide.” The term “nucleic acid molecule” usually refers to a molecule of at least 10 bases in length, unless otherwise specified. The term includes single- and double-stranded forms of DNA. In addition, a polynucleotide may include either or both naturally occurring and modified nucleotides linked together by naturally occurring and/or non-naturally occurring nucleotide linkages.

[0043] Nucleotides are represented by single letter symbols in nucleic acid molecule sequences. The following table lists symbols identifying nucleotides or groups of nucleotides which may occupy the symbol position on a nucleic acid molecule. See Nomenclature Comminute of the International Union of Biochemistry (NC-IUB), Nomenclature for incompletely specified bases in nucleic acid sequences, Recommendations 1984., Eur J Biochem. 150(1):1-5 (1985).

| | | | Complementary |
|---|---|---|---|
| Symbol | Meaning | Group/Origin of Designation | Symbol |
| a | a | Adenine | t/u |
| g | g | Guanine | c |
| c | c | Cytosine | g |
| t | t | Thymine | a |
| u | u | Uracil | a |
| r | g or a | puRine | y |
| y | t/u or c | pYrimidine | r |
| m | a or c | aMino | k |
| k | g or t/u | Keto | m |
| s | g or c | Strong interactions 3H-bonds | w |
| w | a or t/u | Weak interactions 2H-bonds | s |
| b | g or c or t/u | not a | v |
| d | a or g or t/u | not c | h |
| h | a or c or t/u | not g | d |
| v | a or g or c | not t, not u | b |
| n | a or g or c | aNy | n |
| | or t/u, | | |
| | unknown, or | | |
| | other | | |

[0044] The nucleic acid molecules may be modified chemically or biochemically or may contain non-natural or derivatized nucleotide bases, as will be readily appreciated by those of skill in the art. Such modifications include, for example, labels, methylation, substitution of one or more of the naturally occurring nucleotides with an analog, internucleotide modifications such as uncharged linkages (e.g., methyl phosphonates, phosphotriesters, phosphoramidates, carbamates, etc.), charged linkages (e.g., phosphorothioates, phosphorodithioates, etc.), pendent moieties (e.g., polypeptides), intercalators (e.g., acridine, psoralen, etc.), chelators, alkylators, and modified linkages (e.g., alpha anomeric nucleic acids, etc.) The term “nucleic acid molecule” also includes any topological conformation, including single-stranded, double-stranded, partially duplexed, triplexed, hairpinned, circular and padlocked conformations. Also included are synthetic molecules that mimic polynucleotides in their ability to bind to a designated sequence via hydrogen bonding and other chemical interactions. Such molecules are known in the art and include, for example, those in which peptide linkages substitute for phosphate linkages in the backbone of the molecule.

[0045] A “gene” is defined as a nucleic acid molecule that comprises a nucleic acid sequence that encodes a polypeptide and the expression control sequences that surround the nucleic acid sequence that encodes the polypeptide. For instance, a gene may comprise a promoter, one or more enhancers, a nucleic acid sequence that encodes a polypeptide, downstream regulatory sequences and, possibly, other nucleic acid sequences involved in regulation of the expression of an RNA. As is well known in the art, eukaryotic genes usually contain both exons and introns. The term “exon” refers to a nucleic acid sequence found in genomic DNA that is bioinformatically predicted and/or experimentally confirmed to contribute contiguous sequence to a mature mRNA transcript. The term “intron” refers to a nucleic acid sequence found in genomic DNA that is predicted and/or confirmed to not contribute to a mature mRNA transcript, but rather to be “spliced out” during processing of the transcript.

[0046] A nucleic acid molecule or polypeptide is “derived” from a particular species if the nucleic acid molecule or polypeptide has been isolated from the particular species, or if the nucleic acid molecule or polypeptide is homologous to a nucleic acid molecule or polypeptide isolated from a particular species.

[0047] An “isolated” or “substantially pure” nucleic acid or polynucleotide (e.g., an RNA, DNA or a mixed polymer) is one which is substantially separated from other cellular components that naturally accompany the native polynucleotide in its natural host cell, e.g., ribosomes, polymerases, or genomic sequences with which it is naturally associated. The term embraces a nucleic acid or polynucleotide that (1) has been removed from its naturally occurring environment, (2) is not associated with all or a portion of a polynucleotide in which the “isolated polynucleotide” is found in nature, (3) is operatively linked to a polynucleotide which it is not linked to in nature, (4) does not occur in nature as part of a larger sequence or (5) includes nucleotides or internucleoside bonds that are not found in nature. The term “isolated” or “substantially pure” also can be used in reference to recombinant or cloned DINA isolates, chemically synthesized polynucleotide analogs, or polynucleotide analogs that are biologically synthesized by heterologous systems. The term “isolated nucleic acid molecule” includes nucleic acid molecules that are integrated into a host cell chromosome at a heterologous site, recombinant fusions of a native fragment to a heterologous sequence, recombinant vectors present as episomes or as integrated into a host cell chromosome.

[0048] A “part” of a nucleic acid molecule refers to a nucleic acid molecule that comprises a partial contiguous sequence of at least 10 bases of the reference nucleic acid molecule. Preferably, a part comprises at least 15 to 20 bases of a reference nucleic acid molecule. In theory, a nucleic acid sequence of 17 nucleotides is of sufficient length to occur at random less frequently than once in the three gigabase human genome, and thus provides a nucleic acid probe that can uniquely identify the reference sequence in a nucleic acid mixture of genomic complexity. A preferred part is one that comprises a nucleic acid sequence that can encode at least 6 contiguous amino acid sequences (fragments of at least 18 nucleotides) because they are useful in directing the expression or synthesis of peptides that are useful in mapping the epitopes of the polypeptide encoded by the reference nucleic acid. See, e.g., Geysen et al., Proc. Natl. Acad. Sci. USA 81:3998-4002 (1984); and U.S. Pat. Nos. 4,708,871 and 5,595,915, the disclosures of which are incorporated herein by reference in their entireties. A part may also comprise at least 25, 30, 35 or 40 nucleotides of a reference nucleic acid molecule, or at least 50, 60, 70, 80, 90, 100, 150, 200, 250, 300, 350, 400 or 500 nucleotides of a reference nucleic acid molecule. A part of a nucleic acid molecule may comprise no other nucleic acid sequences. Alternatively, a part of a nucleic acid may comprise other nucleic acid sequences from other nucleic acid molecules.

[0049] The term “oligonucleotide” refers to a nucleic acid molecule generally comprising a length of 200 bases or fewer. The term often refers to single-stranded deoxyribonucleotides, but it can refer as well to single- or double-stranded ribonucleotides, RNA:DNA hybrids and double-stranded DNAs, among others. Preferably, oligonucleotides are 10 to 60 bases in length and most preferably 12, 13, 14, 15, 16, 17, 18, 19 or 20 bases in length. Other preferred oligonucleotides are 25, 30, 35, 40, 45, 50, 55 or 60 bases in length. Oligonucleotides may be single-stranded, e.g. for use as probes or primers, or may be double-stranded, e.g. for use in the construction of a mutant gene. Oligonucleotides of the invention can be either sense or antisense oligonucleotides. An oligonucleotide can be derivatized or modified as discussed above for nucleic acid molecules.

[0050] Oligonucleotides, such as single-stranded DNA probe oligonucleotides, often are synthesized by chemical methods, such as those implemented on automated oligonucleotide synthesizers. However, oligonucleotides can be made by a variety of other methods, including in vitro recombinant DNA-mediated techniques and by expression of DNAs in cells and organisms. Initially, chemically synthesized DNAs typically are obtained without a 5′ phosphate. The 5′ ends of such oligonucleotides are not substrates for phosphodiester bond formation by ligation reactions that employ DNA ligases typically used to form recombinant DNA molecules. Where ligation of such oligonucleotides is desired, a phosphate can be added by standard techniques, such as those that employ a kinase and ATP. The 3′ end of a chemically synthesized oligonucleotide generally has a free hydroxyl group and, in the presence of a ligase, such as T4 DNA ligase, readily will form a phosphodiester bond with a 5′ phosphate of another polynucleotide, such as another oligonucleotide. As is well known, this reaction can be prevented selectively, where desired, by removing the 5′ phosphates of the other polynucleotide(s) prior to ligation.

[0051] The term “naturally occurring nucleotide” referred to herein includes naturally occurring deoxyribonucleotides and ribonucleotides. The term “modified nucleotides” referred to herein includes nucleotides with modified or substituted sugar groups and the like. The term “nucleotide linkages” referred to herein includes nucleotide linkages such as phosphorothioate, phosphorodithioate, phosphoroselenoate, phosphorodiselenoate, phosphoroanilothioate, phoshoraniladate, phosphoroamidate, and the like. See e.g., LaPlanche et al. Nucl. Acids Res. 14:9081-9093 (1986); Stein et al. Nucl. Acids Res. 16:3209-3221 (1988); Zon et al. Anti-Cancer Drug Design 6:539-568 (1991); Zon et al., in Eckstein (ed.) Oligonucleotides and Analogues: A Practical Approach, pp. 87-108, Oxford University Press (1991); Uhlmann and Peyman Chemical Reviews 90:543 (1990), and U.S. Pat. No. 5,151,510, the disclosure of which is hereby incorporated by reference in its entirety.

[0052] Unless specified otherwise, the left hand end of a polynucleotide sequence in sense orientation is the 5′ end and the right hand end of the sequence is the 3′ end. In addition, the left hand direction of a polynucleotide sequence in sense orientation is referred to as the 5′ direction, while the right hand direction of the polynucleotide sequence is referred to as the 3′ direction. Further, unless otherwise indicated, each nucleotide sequence is set forth herein as a sequence of deoxyribonucleotides. It is intended, however, that the given sequence be interpreted as would be appropriate to the polynucleotide composition: for example, if the isolated nucleic acid is composed of RNA, the given sequence intends ribonucleotides, with uridine substituted for thymidine.

[0053] The term “allelic variant” refers to one of two or more alternative naturally occurring forms of a gene, wherein each gene possesses a unique nucleotide sequence. In a preferred embodiment, different alleles of a given gene have similar or identical biological properties.

[0054] The term “percent sequence identity” in the context of nucleic acid sequences refers to the residues in two sequences which are the same when aligned for maximum correspondence. The length of sequence identity comparison may be over a stretch of at least about nine nucleotides, usually at least about 20 nucleotides, more usually at least about 24 nucleotides, typically at least about 20 nucleotides, more typically at least about 32 nucleotides, and preferably at least about 36 or more nucleotides. There are a number of different algorithms known in the art which can be used to measure nucleotide sequence identity. For instance, polynucleotide sequences can be compared using FASTA, Gap or Bestfit, which are programs in Wisconsin Package Version 10.0, Genetics Computer Group (GCG), Madison, Wis. FASTA, which includes, e.g., the programs FASTA2 and FASTA3, provides alignments and percent sequence identity of the regions of the best overlap between the query and search sequences (Pearson, Methods Enzymol. 183: 63-98 (1990); Pearson, Methods Mol. Biol. 132: 185-219 (2000); Pearson, Methods Enzymol. 266: 227-258 (1996); Pearson, J. Mol. Biol. 276: 71-84 (1998)). Unless otherwise specified, default parameters for a particular program or algorithm are used. For instance, percent sequence identity between nucleic acid sequences can be determined using FASTA with its default parameters (a word size of 6 and the NOPAM factor for the scoring matrix) or using Gap with its default parameters as provided in GCG Version 6.1.

[0055] A reference to a nucleic acid sequence encompasses its complement unless otherwise specified. Thus, a reference to a nucleic acid molecule having a particular sequence should be understood to encompass its complementary strand, with its complementary sequence. The complementary strand is also useful, e.g., for antisense therapy, double-stranded RNA (dsRNA) inhibition (RNAi), combination of triplex and antisense, hybridization probes and PCR primers.

[0056] In the molecular biology art, researchers use the terms “percent sequence identity”, “percent sequence similarity” and “percent sequence homology” interchangeably. In this application, these terms shall have the same meaning with respect to nucleic acid sequences only.

[0057] The term “substantial similarity” or “substantial sequence similarity,” when referring to a nucleic acid or fragment thereof, indicates that, when optimally aligned with appropriate nucleotide insertions or deletions with another nucleic acid (or its complementary strand), there is nucleotide sequence identity in at least about 50%, more preferably 60% of the nucleotide bases, usually at least about 70%, more usually at least about 60%, preferably at least about 90%, and more preferably at least about 95-98% of the nucleotide bases, as measured by any well known algorithm of sequence identity, such as FASTA, BLAST or Gap, as discussed above.

[0058] Alternatively, substantial similarity exists between a first and second nucleic acid sequence when the first nucleic acid sequence or fragment thereof hybridizes to an antisense strand of the second nucleic acid, under selective hybridization conditions. Typically, selective hybridization will occur between the first nucleic acid sequence and an antisense strand of the second nucleic acid sequence when there is at least about 55% sequence identity between the first and second nucleic acid sequences—preferably at least about 65%, more preferably at least about 75%, and most preferably at least about 90%—over a stretch of at least about 14 nucleotides, more preferably at least 17 nucleotides, even more preferably at least 20, 25, 30, 35, 40, 50, 60, 70, 80, 90 or 100 nucleotides.

[0059] Nucleic acid hybridization will be affected by such conditions as salt concentration, temperature, solvents, the base composition of the hybridizing species, length of the complementary regions, and the number of nucleotide base mismatches between the hybridizing nucleic acids, as will be readily appreciated by those skilled in the art. “Stringent hybridization conditions” and “stringent wash conditions” in the context of nucleic acid hybridization experiments depend upon a number of different physical parameters. The most important parameters include temperature of hybridization, base composition of the nucleic acids, salt concentration and length of the nucleic acid. One having ordinary skill in the art knows how to vary these parameters to achieve a particular stringency of hybridization. In general, “stringent hybridization” is performed at about 25° C. below the thermal melting point (Tₘ) for the specific DNA hybrid under a particular set of conditions. “Stringent washing” is performed at temperatures about 5° C. lower than the Tₘ for the specific DNA hybrid under a particular set of conditions. The Tₘ is the temperature at which 50% of the target sequence hybridizes to a perfectly matched probe. See Sambrook (1989), supra, p. 9.51.

[0060] The Tₘ for a particular DNA-DNA hybrid can be estimated by the formula:
Tₘ=81.5° C.+16.6(log₁₀[Na⁺])+0.41(fraction G+C)−0.63(% formamide)−(600/l) where l is the length of the hybrid in base pairs.

[0061] The Tₘ for a particular RNA-RNA hybrid can be estimated by the formula:
Tₘ=79.8° C.+18.5(log₁₀[Na⁺])+0.58(fraction G+C)+11.8(fraction G+C)²−0.35(% formamide)−(820/l).

[0062] The Tₘ for a particular RNA-DNA hybrid can be estimated by the formula:
Tₘ=79.8° C.+18.5(log₁₀[Na⁺])+0.58(fraction G+C)+11.8(fraction G+C)²−0.50(% formamide)−(820/l).

[0063] In general, the Tₘ decreases by 1-1.5° C. for each 1% of mismatch between two nucleic acid sequences. Thus, one having ordinary skill in the art can alter hybridization and/or washing conditions to obtain sequences that have higher or lower degrees of sequence identity to the target nucleic acid. For instance, to obtain hybridizing nucleic acids that contain up to 10% mismatch from the target nucleic acid sequence, 10-15° C. would be subtracted from the calculated Tₘ of a perfectly matched hybrid, and then the hybridization and washing temperatures adjusted accordingly. Probe sequences may also hybridize specifically to duplex DNA under certain conditions to form triplex or other higher order DNA complexes. The preparation of such probes and suitable hybridization conditions are well known in the art.

[0064] An example of stringent hybridization conditions for hybridization of complementary nucleic acid sequences having more than 100 complementary residues on a filter in a Southern or Northern blot or for screening a library is 50% formamide/6×SSC at 42° C. for at least ten hours and preferably overnight (approximately 16 hours). Another example of stringent hybridization conditions is 6×SSC at 68° C. without formamide for at least ten hours and preferably overnight. An example of moderate stringency hybridization conditions is 6×SSC at 55° C. without formamide for at least ten hours and preferably overnight. An example of low stringency hybridization conditions for hybridization of complementary nucleic acid sequences having more than 100 complementary residues on a filter in a Southern or northern blot or for screening a library is 6×SSC at 42° C. for at least ten hours. Hybridization conditions to identify nucleic acid sequences that are similar but not identical can be identified by experimentally changing the hybridization temperature from 68° C. to 42° C. while keeping the salt concentration constant (6×SSC), or keeping the hybridization temperature and salt concentration constant (e.g. 42° C. and 6×SSC) and varying the formamide concentration from 50% to 0%. Hybridization buffers may also include blocking agents to lower background. These agents are well known in the art. See Sambrook et al. (1989), supra, pages 8.46 and 9.46-9.58. See also Ausubel (1992), supra, Ausubel (1999), supra, and Sambrook (2001), supra.

[0065] Wash conditions also can be altered to change stringency conditions. An example of stringent wash conditions is a 0.2×SSC wash at 65° C. for 15 minutes (see Sambrook (1989), supra, for SSC buffer). Often the high stringency wash is preceded by a low stringency wash to remove excess probe. An exemplary medium stringency wash for duplex DNA of more than 100 base pairs is 1×SSC at 45° C. for 15 minutes. An exemplary low stringency wash for such a duplex is 4×SSC at 40° C. for 15 minutes. In general, signal-to-noise ratio of 2× or higher than that observed for an unrelated probe in the particular hybridization assay indicates detection of a specific hybridization.

[0066] As defined herein, nucleic acids that do not hybridize to each other under stringent conditions are still substantially similar to one another if they encode polypeptides that are substantially identical to each other. This occurs, for example, when a nucleic acid is created synthetically or recombinantly using a high codon degeneracy as permitted by the redundancy of the genetic code.

[0067] Hybridization conditions for nucleic acid molecules that are shorter than 100 nucleotides in length (e.g., for oligonucleotide probes) may be calculated by the formula:

[0068] Tₘ=81.5° C.+16.6(log₁₀[Na⁺])+0.41(fraction G+C)−(600/N), wherein N is

[0069] change length and the [Na⁺] is 1 M or less. See Sambrook (1989), supra, p. 11.46. For hybridization of probes shorter than 100 nucleotides, hybridization is usually performed under stringent conditions (5-10° C. below the Tₘ) using high concentrations (0.1-1.0 pmol/ml) of probe. Id. at p. 11.45. Determination of hybridization using mismatched probes, pools of degenerate probes or “guessmers,” as well as hybridization solutions and methods for empirically determining hybridization conditions are well known in the art. See, e.g., Ausubel (1999), supra; Sambrook (1989), supra, pp. 11.45-11.57.

[0070] The term “digestion” or “digestion of DNA” refers to catalytic cleavage of the DNA with a restriction enzyme that acts only at certain sequences in the DNA. The various restriction enzymes referred to herein are commercially available and their reaction conditions, cofactors and other requirements for use are known and routine to the skilled artisan. For analytical purposes, typically, 1 μg of plasmid or DNA fragment is digested with about 2 units of enzyme in about 20 μl of reaction buffer. For the purpose of isolating DNA fragments for plasmid construction, typically 5 to 50 μg of DNA are digested with 20 to 250 units of enzyme in proportionately larger volumes. Appropriate buffers and substrate amounts for particular restriction enzymes are described in standard laboratory manuals, such as those referenced below, and are specified by commercial suppliers. Incubation times of about 1 hour at 37° C. are ordinarily used, but conditions may vary in accordance with standard procedures, the supplier's instructions and the particulars of the reaction. After digestion, reactions may be analyzed, and fragments may be purified by electrophoresis through an agarose or polyacrylamide gel, using well known methods that are routine for those skilled in the art.

[0071] The term “ligation” refers to the process of forming phosphodiester bonds between two or more polynucleotides, which most often are double-stranded DNAs. Techniques for ligation are well known to the art and protocols for ligation are described in standard laboratory manuals and references, such as, e.g., Sambrook (1989), supra.

[0072] Genome-derived “single exon probes,” are probes that comprise at least part of an exon (“reference exon”) and can hybridize detectably under high stringency conditions to transcript-derived nucleic acids that include the reference exon but do not hybridize detectably under high stringency conditions to nucleic acids that lack the reference exon. Single exon probes typically further comprise, contiguous to a first end of the exon portion, a first intronic and/or intergenic sequence that is identically contiguous to the exon in the genome, and may contain a second intronic and/or intergenic sequence that is identically contiguous to the exon in the genome. The minimum length of genome-derived single exon probes is defined by the requirement that the exonic portion be of sufficient length to hybridize under high stringency conditions to transcript-derived nucleic acids, as discussed above. The maximum length of genome-derived single exon probes is defined by the requirement that the probes contain portions of no more than one exon. The single exon probes may contain priming sequences not found in contiguity with the rest of the probe sequence in the genome, which priming sequences are useful for PCR and other amplification-based technologies. In another aspect, the invention is directed to single exon probes based on the CSNAs disclosed herein.

[0073] In one embodiment, the term “microarray” refers to a “nucleic acid microarray” having a substrate-bound plurality of nucleic acids, hybridization to each of the plurality of bound nucleic acids being separately detectable. The substrate can be solid or porous, planar or non-planar, unitary or distributed. Nucleic acid microarrays include all the devices so called in Schena (ed.), DNA Microarrays: A Practical Approach (Practical Approach Series), Oxford University Press (1999); Nature Genet. 21(1)(suppl.): 1-60 (1999); Schena (ed.), Microarray Biochip: Tools and Technology, Eaton Publishing Company/BioTechniques Books Division (2000). Additionally, these nucleic acid microarrays include a substrate-bound plurality of nucleic acids in which the plurality of nucleic acids are disposed on a plurality of beads, rather than on a unitary planar substrate, as is described, inter alia, in Brenner et al., Proc. Natl. Acad. Sci. USA 97(4):1665-1670 (2000). Examples of nucleic acid microarrays may be found in U.S. Pat. Nos. 6,391,623, 6,383,754, 6,383,749, 6,380,377, 6,379,897, 6,376,191, 6,372,431, 6,351,712 6,344,316, 6,316,193, 6,312,906, 6,309,828, 6,309,824, 6,306,643, 6,300,063, 6,287,850, 6,284,497, 6,284,465, 6,280,954, 6,262,216, 6,251,601, 6,245,518, 6,263,287, 6,251,601, 6,238,866, 6,228,575, 6,214,587, 6,203,989, 6,171,797, 6,103,474, 6,083,726, 6,054,274, 6,040,138, 6,083,726, 6,004,755, 6,001,309, 5,958,342, 5,952,180, 5,936,731, 5,843,655, 5,814,454, 5,837,196, 5,436,327, 5,412,087, and 5,405,783, the disclosures of which are incorporated herein by reference in their entireties.

[0074] In an alternative embodiment, a “microarray” may also refer to a “peptide microarray” or “protein microarray” having a substrate-bound collection or plurality of polypeptides, the binding to each of the plurality of bound polypeptides being separately detectable. Alternatively, the peptide microarray may have a plurality of binders, including but not limited to monoclonal antibodies, polyclonal antibodies, phage display binders, yeast 2 hybrid binders, and aptamers, which can specifically detect the binding of the polypeptides of this invention. The array may be based on autoantibody detection to the polypeptides of this invention, see Robinson et al., Nature Medicine 8(3):295-301 (2002). Examples of peptide arrays may be found in WO 02/31463, WO 02/25288, WO 01/94946, WO 01/88162, WO 01/68671, WO 01/57259, WO 00/61806, WO 00/54046, WO 00/47774, WO 99/40434, WO 99/39210, and WO 97/42507 and U.S. Pat. Nos. 6,268,210, 5,766,960, and 5,143,854, the disclosures of which are incorporated herein by reference in their entireties.

[0075] In addition, determination of the levels of the CSNA or CSP may be made in a multiplex manner using techniques described in WO 02/29109, WO 02/24959, WO 01/83502, WO01/73113, WO 01/59432, WO 01/57269, and WO 99/67641, the disclosures of which are incorporated herein by reference in their entireties.

[0076] The term “mutant”, “mutated”, or “mutation” when applied to nucleic acid sequences means that nucleotides in a nucleic acid sequence may be inserted, deleted or changed compared to a reference nucleic acid sequence. A single alteration may be made at a locus (a point mutation) or multiple nucleotides may be inserted, deleted or changed at a single locus. In addition, one or more alterations may be made at any number of loci within a nucleic acid sequence. In a preferred embodiment of the present invention, the nucleic acid sequence is the wild type nucleic acid sequence encoding a CSP or is a CSNA. The nucleic acid sequence ma) be mutated by any method known in the art including those mutagenesis techniques described infra.

[0077] The term “error-prone PCR” refers to a process for performing PCR under conditions where the copying fidelity of the DNA polymerase is low, such that a high rate of point mutations is obtained along the entire length of the PCR product. See, e.g., Leung et al., Technique 1: 11-15 (1989) and Caldwell et al., PCR Methods Applic. 2: 28-33 (1992).

[0078] The term “oligonucleotide-directed mutagenesis” refers to a process which enables the generation of site-specific mutations in any cloned DNA segment of interest. See, e.g., Reidhaar-Olson et al., Science 241: 53-57 (1988).

[0079] The term “assembly PCR” refers to a process which involves the assembly of a PCR product from a mixture of small DNA fragments. A large number of different PCR reactions occur in parallel in the same vial, with the products of one reaction priming the products of another reaction.

[0080] The term “sexual PCR mutagenesis” or “DNA shuffling” refers to a method of error-prone PCR coupled with forced homologous recombination between DNA molecules of different but highly related DNA sequence in vitro, caused by random fragmentation of the DNA molecule based on sequence similarity, followed by fixation of the crossover by primer extension in an error-prone PCR reaction. See, e.g., Stemmer, Proc. Natl. Acad. Sci. U.S.A. 91: 10747-10751 (1994). DNA shuffling can be carried out between several related genes (“Family shuffling”).

[0081] The term “in vivo mutagenesis” refers to a process of generating random mutations in any cloned DNA of interest which involves the propagation of the DNA in a strain of bacteria such as E. coli that carries mutations in one or more of the DNA repair pathways. These “mutator” strains have a higher random mutation rate than that of a wild-type parent. Propagating the DNA in a mutator strain will eventually generate random mutations within the DNA.

[0082] The term “cassette mutagenesis” refers to any process for replacing a small region of a double-stranded DNA molecule with a synthetic oligonucleotide “cassette” that differs from the native sequence. The oligonucleotide often contains completely and/or partially randomized native sequence.

[0083] The term “recursive ensemble mutagenesis” refers to an algorithm for protein engineering (protein mutagenesis) developed to produce diverse populations of phenotypically related mutants whose members differ in amino acid sequence. This method uses a feedback mechanism to control successive rounds of combinatorial cassette mutagenesis. See, e.g., Arkin et al., Proc. Natl. Acad. Sci. U.S.A. 89: 7811-7815 (1992).

[0084] The term “exponential ensemble mutagenesis” refers to a process for generating combinatorial libraries with a high percentage of unique and functional mutants, wherein small groups of residues are randomized in parallel to identify, at each altered position, amino acids which lead to functional proteins. See, e.g., Delegrave et al., Biotechnology Research 11: 1548-1552 (1993); Arnold, Current Opinion in Biotechnology 4: 450-455 (1993).

[0085] “Operatively linked” expression control sequences refers to a linkage in which the expression control sequence is either contiguous with the gene of interest to control the gene of interest, or acts in trails or at a distance to control the gene of interest.

[0086] The term “expression control sequence” as used herein refers to polynucleotide sequences which are necessary to affect the expression of coding sequences to which they are operatively linked. Expression control sequences are sequences which control the transcription, post-transcriptional events and translation of nucleic acid sequences. Expression control sequences include appropriate transcription initiation, termination, promoter and enhancer sequences; efficient RNA processing signals such as splicing and polyadenylation signals; sequences that stabilize cytoplasmic mRNA; sequences that enhance translation efficiency (e.g., ribosome binding sites); sequences that enhance protein stability; and when desired, sequences that enhance protein secretion. The nature of such control sequences differs depending upon the host organism; in prokaryotes, such control sequences generally include promoter, ribosomal binding site, and transcription termination sequence. The term “control sequences” is intended to include, at a minimum, all components whose presence is essential for expression, and can also include additional components whose presence is advantageous, for example, leader sequences and fusion partner sequences.

[0087] The term “vector,” as used herein, is intended to refer to a nucleic acid molecule capable of transporting another nucleic acid to which it has been linked. One type of vector is a “plasmid”, which refers to a circular double-stranded DNA loop into which additional DNA segments may be ligated. Other vectors include cosmids, bacterial artificial chromosomes (BAC) and yeast artificial chromosomes (YAC). Another type of vector is a viral vector, wherein additional DNA segments may be ligated into the viral genome. Viral vectors that infect bacterial cells are referred to as bacteriophages. Certain vectors are capable of autonomous replication in a host cell into which they are introduced (e.g., bacterial vectors having a bacterial origin of replication). Other vectors can be integrated into the genome of a host cell upon introduction into the host cell, and thereby are replicated along with the host genome. Moreover, certain vectors are capable of directing the expression of genes to which they are operatively linked. Such vectors are referred to herein as “recombinant expression vectors” (or simply, “expression vectors”). In general, expression vectors of utility in recombinant DNA techniques are often in the form of plasmids. In the present specification, “plasmid” and “vector” may be used interchangeably as the plasmid is the most commonly used form of vector. However, the invention is intended to include other forms of expression vectors that serve equivalent functions.

[0088] The term “recombinant host cell” (or simply “host cell”), as used herein, is intended to refer to a cell into which a recombinant expression vector has been introduced. It should be understood that such terms are intended to refer not only to the particular subject cell but to the progeny of such a cell. Because certain modifications may occur in succeeding generations due to either mutation or environmental influences, such progeny may not, in fact, be identical to the parent cell, but are still included within the scope of the term “host cell” as used herein.

[0089] As used herein, the phrase “open reading frame” and the equivalent acronym “ORF” refers to that portion of a transcript-derived nucleic acid that can be translated in its entirety into a sequence of contiguous amino acids. As so defined, an ORF has length, measured in nucleotides, exactly divisible by 3. As so defined, an ORF need not encode the entirety of a natural protein.

[0090] As used herein, the phrase “ORF-encoded peptide” refers to the predicted or actual translation of an ORF.

[0091] As used herein, the phrase “degenerate variant” of a reference nucleic acid sequence is meant to be inclusive of all nucleic acid sequences that can be directly translated, using the standard genetic code, to provide an amino acid sequence identical to that translated from the reference nucleic acid sequence.

[0092] The term “polypeptide” encompasses both naturally occurring and non-naturally occurring proteins and polypeptides, as well as polypeptide fragments and polypeptide mutants, derivatives and analogs thereof. A polypeptide may be monomeric or polymeric. Further, a polypeptide may comprise a number of different modules within a single polypeptide each of which has one or more distinct activities. A preferred polypeptide in accordance with the invention comprises a CSP encoded by a nucleic acid molecule of the instant invention, or a fragment, mutant, analog or derivative thereof.

[0093] The term “isolated protein” or “isolated polypeptide” is a protein or polypeptide that by virtue of its origin or source of derivation (1) is not associated with naturally associated components that accompany it in its native state, (2) is free of other proteins from the same species (3) is expressed by a cell from a different species, or (4) does not occur in nature. Thus, a polypeptide that is chemically synthesized or synthesized in a cellular system different from the cell from which it naturally originates will be “isolated” from its naturally associated components. A polypeptide or protein may also be rendered substantially free of naturally associated components by isolation, using protein purification techniques well known in the art.

[0094] A protein or polypeptide is “substantially pure,” “substantially homogeneous” or “substantially purified” when at least about 60% to 75% of a sample exhibits a single species of polypeptide. The polypeptide or protein may be monomeric or multimeric. A substantially pure polypeptide or protein will typically comprise about 50%, 60%, 70%, 80% or 90% W/W of a protein sample, more usually about 95%, and preferably will be over 99% pure. Protein purity or homogeneity may be determined by a number of means well known in the art, such as polyacrylamide gel electrophoresis of a protein sample, followed by visualizing a single polypeptide band upon staining the gel with a stain well known in the art. For certain purposes, higher resolution may be provided by using HPLC or other means well known in the art for purification.

[0095] The term “fragment” when used herein with respect to polypeptides of the present invention refers to a polypeptide that has an amino-terminal and/or carboxy-terminal deletion compared to a full-length CSP. In a preferred embodiment, the fragment is a contiguous sequence in which the amino acid sequence of the fragment is identical to the corresponding positions in the naturally occurring polypeptide. Fragments typically are at least 5, 6, 7, 8, 9 or 10 amino acids long, preferably at least 12, 14, 16 or 18 amino acids long, more preferably at least 20 amino acids long, more preferably at least 25, 30, 35, 40 or 45, amino acids, even more preferably at least 50 or 60 amino acids long, and even more preferably at least 70 amino acids long.

[0096] A “derivative” when used herein with respect to polypeptides of the present invention refers to a polypeptide which is substantially similar in primary structural sequence to a CSP but which include, e.g., in vivo or in vitro chemical and biochemical modifications that are not found in the CSP. Such modifications include, for example, acetylation, acylation, ADP-ribosylation, amidation, covalent attachment of flavin, covalent attachment of a heme moiety, covalent attachment of a nucleotide or nucleotide derivative, covalent attachment of a lipid or lipid derivative, covalent attachment of phosphotidylinositol, cross-linking, cyclization, disulfide bond formation, demethylation, formation of covalent cross-links, formation of cystine, formation of pyroglutamate, formylation, gamma-carboxylation, glycosylation, GPI anchor formation, hydroxylation, iodination, methylation, myristoylation, oxidation, proteolytic processing, phosphorylation, prenylation, racemization, selenoylation, sulfation, transfer-RNA mediated addition of amino acids to proteins such as arginylation, and ubiquitination. Other modifications include, e.g., labeling with radionuclides, and various enzymatic modifications, as will be readily appreciated by those skilled in the art. A variety of methods for labeling polypeptides and of substituents or labels useful for such purposes are well known in the art, and include radioactive isotopes such as ¹²⁵I, ³²P, ³⁵S, ¹⁴C and ³H, ligands which bind to labeled antiligands (e.g., antibodies), fluorophores, chemiluminescent agents, enzymes, and antiligands which can serve as specific binding pair members for a labeled ligand. The choice of label depends on the sensitivity required, ease of conjugation with the primer, stability requirements, and available instrumentation. Methods for labeling polypeptides are well known in the art. See Ausubel (1992), supra; Ausubel (1999), supra.

[0097] The term “fusion protein” refers to polypeptides of the present invention coupled to a heterologous amino acid sequence. Fusion proteins are useful because they can be constructed to contain two or more desired functional elements from two or more different proteins. A fusion protein comprises at least 10 contiguous amino acids from a polypeptide of interest, more preferably at least 20 or 30 amino acids, even more preferably at least 40, 50 or 60 amino acids, yet more preferably at least 75, 100 or 125 amino acids. Fusion proteins can be produced recombinantly by constructing a nucleic acid sequence that encodes the polypeptide or a fragment thereof in frame with a nucleic acid sequence encoding a different protein or peptide and then expressing the fusion protein. Alternatively, a fusion protein can be produced chemically by crosslinking the polypeptide or a fragment thereof to another protein.

[0098] The term “analog” refers to both polypeptide analogs and non-peptide analogs. The term “polypeptide analog” as used herein refers to a polypeptide that is comprised of a segment of at least 25 amino acids that has substantial identity to a portion of an amino acid sequence but which contains non-natural amino acids or non-natural inter-residue bonds. In a preferred embodiment, the analog has the same or similar biological activity as the native polypeptide. Typically, polypeptide analogs comprise a conservative amino acid substitution (or insertion or deletion) with respect to the naturally occurring sequence. Analogs typically are at least 20 amino acids long, preferably at least 50 amino acids long or longer, and can often be as long as a full-length naturally occurring polypeptide.

[0099] The term “non-peptide analog” refers to a compound with properties that are analogous to those of a reference polypeptide. A non-peptide compound may also be termed a “peptide mimetic” or a “peptidomimetic.” Such compounds are often developed with the aid of computerized molecular modeling. Peptide mimetics that are structurally similar to useful peptides may be used to produce an equivalent effect. Generally, peptidomimetics are structurally similar to a paradigm polypeptide (i.e., a polypeptide that has a desired biochemical property or pharmacological activity), but have one or more peptide linkages optionally replaced by a linkage selected from the group consisting of: —CH₂NH—, —CH₂S—, —CH₂—CH₂—, —CH═CH-(cis and trans), —COCH₂—, —CH(OH)CH₂—, and —CH₂SO—, by methods well known in the art. Systematic substitution of one or more amino acids of a consensus sequence with a D-amino acid of the same type (e.g., D-lysine in place of L-lysine) may also be used to generate more stable peptides. In addition, constrained peptides comprising a consensus sequence or a substantially identical consensus sequence variation may be generated by methods known in the art (Rizo et al., Ann. Rely. Biochem. 61:387-418 (1992)). For example, one may add internal cysteine residues capable of forming intramolecular disulfide bridges which cyclize the peptide.

[0100] The term “mutant” or “mutein” when referring to a polypeptide of the present invention relates to an amino acid sequence containing substitutions, insertions or deletions of one or more amino acids compared to the amino acid sequence of a CSP. A mutein may have one or more amino acid point substitutions, in which a single amino acid at a position has been changed to another amino acid, one or more insertions and/or deletions, in which one or more amino acids are inserted or deleted, respectively, in the sequence of the naturally occurring protein, and/or truncations of the amino acid sequence at either or both the amino or carboxy termini. Further, a mutein may have the same or different biological activity as the naturally occurring protein. For instance, a mutein may have an increased or decreased biological activity. A mutein has at least 50% sequence similarity to the wild type protein, preferred is 60% sequence similarity, more preferred is 70% sequence similarity. Even more preferred are muteins having 80%, 85% or 90% sequence similarity to a CSP. In an even more preferred embodiment, a mutein exhibits 95% sequence identity, even more preferably 97%, even more preferably 98% and even more preferably 99%. Sequence similarity may be measured by any common sequence analysis algorithm, such as GAP or BESTFIT or other variation Smith-Waterman alignment. See, T. F. Smith and M. S. Waterman, J. Mol. Biol. 147:195-197 (1981) and W. R. Pearson, Genomics 11:635-650 (1991).

[0101] Preferred amino acid substitutions are those which: (1) reduce susceptibility to proteolysis, (2) reduce susceptibility to oxidation, (3) alter binding affinity for forming protein complexes, (4) alter binding affinity or enzymatic activity, and (5) confer or modify other physicochemical or functional properties of such analogs. For example, single or multiple amino acid substitutions (preferably conservative amino acid substitutions) may be made in the naturally occurring sequence (preferably in the portion of the polypeptide outside the domain(s) forming intermolecular contacts. In a preferred embodiment, the amino acid substitutions are moderately conservative substitutions or conservative substitutions. In a more preferred embodiment, the amino acid substitutions are conservative substitutions. A conservative amino acid substitution should not substantially change the structural characteristics of the parent sequence (e.g., a replacement amino acid should not tend to disrupt a helix that occurs in the parent sequence, or disrupt other types of secondary structure that characterize the parent sequence). Examples of art-recognized polypeptide secondary and tertiary structures are described in Creighton (ed.), Proteins, Structures and Molecular Principles, W. H. Freeman and Company (1984); Branden et al. (ed.), Introduction to Protein Structure, Garland Publishing (1991); Thornton et al., Nature 354:105-106 (1991).

[0102] As used herein, the twenty conventional amino acids and their abbreviations follow conventional usage. See Golub et al. (eds.), Immunology—A Synthesis 2^{nd} Ed., Sinauer Associates (1991). Stereoisomers (e.g., D-amino acids) of the twenty conventional amino acids, unnatural amino acids such as α-,α-disubstituted amino acids, N-alkyl amino acids, and other unconventional amino acids may also be suitable components for polypeptides of the present invention. Examples of unconventional amino acids include: 4-hydroxyproline, γ-carboxyglutamate, ε-N,N,N-trimethyllysine, ε-N-acetyllysine, O-phosphoserine, N-acetylserine, N-formylmethionine, 3-methylhistidine, 5-hydroxylysine, s-N-methylarginine, and other similar amino acids and imino acids (e.g., 4-hydroxyproline). In the polypeptide notation used herein, the lefthand direction is the amino terminal direction and the right hand direction is the carboxy-terminal direction, in accordance with standard usage and convention.

[0103] By “homology” or “homologous” when referring to a polypeptide of the present invention it is meant polypeptides from different organisms with a similar sequence to the encoded amino acid sequence of a CSP and a similar biological activity or function. Although two polypeptides are said to be “homologous,” this does not imply that there is necessarily an evolutionary relationship between the polypeptides. Instead, the term “homologous” is defined to mean that the two polypeptides have similar amino acid sequences and similar biological activities or functions. In a preferred embodiment, a homologous polypeptide is one that exhibits 50% sequence similarity to CSP, preferred is 60% sequence similarity, more preferred is 70% sequence similarity. Even more preferred are homologous polypeptides that exhibit 80%, 85% or 90% sequence similarity to a CSP. In yet a more preferred embodiment, a homologous polypeptide exhibits 95%, 97%, 98% or 99% sequence similarity.

[0104] When “sequence similarity” is used in reference to polypeptides, it is recognized that residue positions that are not identical often differ by conservative amino acid substitutions. In a preferred embodiment, a polypeptide that has “sequence similarity” comprises conservative or moderately conservative amino acid substitutions. A “conservative amino acid substitution” is one in which an amino acid residue is substituted by another amino acid residue having a side chain (R group) with similar chemical properties (e.g., charge or hydrophobicity). In general, a conservative amino acid substitution will not substantially change the functional properties of a protein. In cases where two or more amino acid sequences differ from each other by conservative substitutions, the percent sequence identity or degree of similarity may be adjusted upwards to correct for the conservative nature of the substitution. Means for making this adjustment are well known to those of skill in the art. See, e.g., Pearson, Methods Mol. Biol. 24: 307-31(1994).

[0105] For instance, the following six groups each contain amino acids that are conservative substitutions for one another:

[0106] 1) Serine (S), Threonine (T);

[0107] 2) Aspartic Acid (D), Glutamic Acid (E);

[0108] 3) Asparagine (N), Glutamine (Q);

[0109] 4) Arginine (R), Lysine (K);

[0110] 5) Isoleucine (I), Leucine (L), Methionine (M), Alanine (A), Valine (V), and

[0111] 6) Phenylalanine (F), Tyrosine (Y), Tryptophan (W).

[0112] Alternatively, a conservative replacement is any change having a positive value in the PAM250 log-likelihood matrix disclosed in Gonnet et al., Science 256: 1443-45 (1992). A “moderately conservative” replacement is any change having a nonnegative value in the PAM250 log-likelihood matrix.

[0113] Sequence similarity for polypeptides, which is also referred to as sequence identity, is typically measured using sequence analysis software. Protein analysis software matches similar sequences using measures of similarity assigned to various substitutions, deletions and other modifications, including conservative amino acid substitutions. For instance, GCG contains programs such as “Gap” and “Bestfit” which can be used with default parameters to determine sequence homology or sequence identity between closely related polypeptides, such as homologous polypeptides from different species of organisms or between a wild type protein and a mutein thereof. See, e.g., GCG Version 6.1. Other programs include FASTA, discussed supra.)

[0114] A preferred algorithm when comparing a sequence of the invention to a database containing a large number of sequences from different organisms is the computer program BLAST, especially blastp or tblastn. See, e.g., Altschul et al., J. Mol. Biol. 215: 403-410 (1990); Altschul et al., Nucleic Acids Res. 25:3389-402 (1997). Preferred parameters for blastp are:

| | |
|---|---|
| Expectation value: | 10 (default) |
| Filter: | seg (default) |
| Cost to open a gap: | 11 (default) |
| Cost to extend a gap: | 1 (default |
| Max. alignments: | 100 (default) |
| Word size: | 11 (default) |
| No. of descriptions: | 100 (default) |
| Penalty Matrix: | BLOSUM62 |

[0115] The length of polypeptide sequences compared for homology will generally be at least about 16 amino acid residues, usually at least about 20 residues, more usually at least about 24 residues, typically at least about 28 residues, and preferably more than about 35 residues. When searching a database containing sequences from a large number of different organisms, it is preferable to compare amino acid sequences.

[0116] Algorithms other than blastp for database searching using amino acid sequences are known in the art. For instance, polypeptide sequences can be compared using FASTA, a program in GCG Version 6.1. FASTA (e.g., FASTA2 and FASTA3) provides alignments and percent sequence identity of the regions of the best overlap between the query and search sequences (Pearson (1990), supra; Pearson (2000), supra. For example, percent sequence identity between amino acid sequences can be determined using FASTA with its default or recommended parameters (a word size of 2 and the PAM250 scoring matrix), as provided in GCG Version 6.1.

[0117] An “antibody” refers to an intact immunoglobulin, or to an antigen-binding portion thereof that competes with the intact antibody for specific binding to a molecular species, e.g., a polypeptide of the instant invention. Antigen-binding portions may be produced by recombinant DNA techniques or by enzymatic or chemical cleavage of intact antibodies. Antigen-binding portions include, inter alia, Fab, Fab′, F(ab′)₂, Fv, dAb, and complementarity determining region (CDR) fragments, single-chain antibodies (scFv), chimeric antibodies, diabodies and polypeptides that contain at least a portion of an immunoglobulin that is sufficient to confer specific antigen binding to the polypeptide. A Fab fragment is a monovalent fragment consisting of the VL, VH, CL and CH1 domains; a F(ab′)₂ fragment is a bivalent fragment comprising two Fab fragments linked by a disulfide bridge at the hinge region; a Fd fragment consists of the VH and CH1 domains; a Fv fragment consists of the VL and VH domains of a single arm of an antibody; and a dAb fragment consists of a VH domain. See, e.g., Ward et al., Nature 341: 544-546 (1989).

[0118] By “bind specifically” and “specific binding” as used herein it is meant the ability of the antibody to bind to a first molecular species in preference to binding to other molecular species with which the antibody and first molecular species are admixed. An antibody is said to “recognize” a first molecular species when it can bind specifically to that first molecular species.

[0119] A single-chain antibody (scFv) is an antibody in which VL and VH regions are paired to form a monovalent molecule via a synthetic linker that enables them to be made as a single protein chain. See, e.g., Bird et al., Science 242: 423-426 (1988); Huston et al., Proc. Natl. Acad. Sci. USA 85: 5879-5883 (1988). Diabodies are bivalent, bispecific antibodies in which VH and VL domains are expressed on a single polypeptide chain, but using a linker that is too short to allow for pairing between the two domains on the same chain, thereby forcing the domains to pair with complementary domains of another chain and creating two antigen binding sites. See e.g., Holliger et al., Proc. Natl. Acad. Sci. USA 90: 6444-6448 (1993); Poljak et al., Structure 2: 1121-1123 (1994). One or more CDRs may be incorporated into a molecule either covalently or noncovalently to make it an immunoadhesin. An immunoadhesin may incorporate the CDR(s) as part of a larger polypeptide chain, may covalently link the CDR(s) to another polypeptide chain, or may incorporate the CDR(s) noncovalently. The CDRs permit the immunoadhesin to specifically bind to a particular antigen of interest. A chimeric antibody is an antibody that contains one or more regions from one antibody and one or more regions from one or more other antibodies.

[0120] An antibody may have one or more binding sites. If there is more than one binding site, the binding sites may be identical to one another or may be different. For instance, a naturally occurring immunoglobulin has two identical binding sites, a single-chain antibody or Fab fragment has one binding site, while a “bispecific” or “bifunctional” antibody has two different binding sites.

[0121] An “isolated antibody” is an antibody that (1) is not associated with naturally-associated components, including other naturally-associated antibodies, that accompany it in its native state, (2) is free of other proteins from the same species, (3) is expressed by a cell from a different species, or (4) does not occur in nature. It is known that purified proteins, including purified antibodies, may be stabilized with non-naturally-associated components. The non-naturally-associated component may be a protein, such as albumin (e.g., BSA) or a chemical such as polyethylene glycol (PEG).

[0122] A “neutralizing antibody” or “an inhibitory antibody” is an antibody that inhibits the activity of a polypeptide or blocks the binding of a polypeptide to a ligand that normally binds to it. An “activating antibody” is an antibody that increases the activity of a polypeptide.

[0123] The term “epitope” includes any protein determinant capable of specific binding to an immunoglobulin or T-cell receptor. Epitopic determinants usually consist of chemically active surface groupings of molecules such as amino acids or sugar side chains and usually have specific three-dimensional structural characteristics, as well as specific charge characteristics. An antibody is said to specifically bind an antigen when the dissociation constant is less than 1 μM, preferably less than 100 nM and most preferably less than 10 nM.

[0124] The term “patient” includes human and veterinary subjects.

[0125] Throughout this specification and claims, the word “comprise,” or variations such as “comprises” or “comprising,” will be understood to imply the inclusion of a stated integer or group of integers but not the exclusion of any other integer or group of integers.

[0126] The term “colon specific” refers to a nucleic acid molecule or polypeptide that is expressed predominantly in the colon as compared to other tissues in the body. In a preferred embodiment, a “colon specific” nucleic acid molecule or polypeptide is detected at a level that is 1.5-fold higher than any other tissue in the body. In a more preferred embodiment, the “colon specific” nucleic acid molecule or polypeptide is detected at a level that is 2-fold higher than any other tissue in the body, more preferably 5-fold higher, still more preferably at least 10-fold, 15-fold, 20-fold, 25-fold, 50-fold or 100-fold higher than any other tissue in the body. Nucleic acid molecule levels may be measured by nucleic acid hybridization, such as Northern blot hybridization, or quantitative PCR. Polypeptide levels may be measured by any method known to accurately quantitate protein levels, such as Western blot analysis.

Nucleic Acid Molecules, Regulatory Sequences, Vectors, Host Cells and Recombinant Methods of Making Polypeptides

[0127] Nucleic Acid Molecules

[0128] One aspect of the invention provides isolated nucleic acid molecules that are specific to the colon or to colon cells or tissue or that are derived from such nucleic acid molecules. These isolated colon specific nucleic acids (CSNAs) may comprise cDNA genomic DNA, ROSA, or a combination thereof, a fragment of one of these nucleic acids, or may be a non-naturally occurring nucleic acid molecule. A CSNA may be derived from an animal. In a preferred embodiment, the CSNA is derived from a human or other mammal. In a more preferred embodiment, the CSNA is derived from a human or other primate. In an even more preferred embodiment, the CSNA is derived from a human.

[0129] In a preferred embodiment, the nucleic acid molecule encodes a polypeptide that is specific to colon, a colon-specific polypeptide (CSP). In a more preferred embodiment, the nucleic acid molecule encodes a polypeptide that comprises an amino acid sequence of SEQ ID NO: 113-259. In another highly preferred embodiment, the nucleic acid molecule comprises a nucleic acid sequence of SEQ ID NO: 1-112. Nucleotide sequences of the instantly-described nucleic acid molecules were determined by assembling several DNA molecules from either public or proprietary databases. Some of the underlying DNA sequences are the result, directly or indirectly, of at least one enzymatic polymerization reaction (e.g., reverse transcription and/or polymerase chain reaction) using an automated sequencer (such as the MegaBACE™ 1000, Amersham Biosciences, Sunnyvale, Calif., USA).

[0130] Nucleic acid molecules of the present invention may also comprise sequences that selectively hybridize to a nucleic acid molecule encoding a CSNA or a complement or antisense thereof. The hybridizing nucleic acid molecule may or may not encode a polypeptide or may or may not encode a CSP. However, in a preferred embodiment, the hybridizing nucleic acid molecule encodes a CSP. In a more preferred embodiment, the invention provides a nucleic acid molecule that selectively hybridizes to a nucleic acid molecule or the antisense sequence of a nucleic acid molecule that encodes a polypeptide comprising an amino acid sequence of SEQ ID NO: 113-259. In an even more preferred embodiment, the invention provides a nucleic acid molecule that selectively hybridizes to a nucleic acid molecule comprising the nucleic acid sequence of SEQ ID NO: 1-112 or the antisense sequence thereof. Preferably, the nucleic acid molecule selectively hybridizes to a nucleic acid molecule or the antisense sequence of a nucleic acid molecule encoding a CSP under low stringency conditions. More preferably, the nucleic acid molecule selectively hybridizes to a nucleic acid molecule or the antisense sequence of a nucleic acid molecule encoding a CSP under moderate stringency conditions. Most preferably, the nucleic acid molecule selectively hybridizes to a nucleic acid molecule or the antisense sequence of a nucleic acid molecule encoding a CSP under high stringency conditions. In a preferred embodiment, the nucleic acid molecule hybridizes under low, moderate or high stringency conditions to a nucleic acid molecule or the antisense sequence of a nucleic acid molecule encoding a polypeptide comprising an amino acid sequence of SEQ ID NO: 113-259. In a more preferred embodiment, the nucleic acid molecule hybridizes under low, moderate or high stringency conditions to a nucleic acid molecule or the antisense sequence of a nucleic acid molecule comprising a nucleic acid sequence selected from SEQ ID NO: 1-112.

[0131] Nucleic acid molecules of the present invention may also comprise nucleic acid sequences that exhibit substantial sequence similarity to a nucleic acid encoding a CSP or a complement of the encoding nucleic acid molecule. In this embodiment, it is preferred that the nucleic acid molecule exhibit substantial sequence similarity to a nucleic acid molecule encoding human CSP. More preferred is a nucleic acid molecule exhibiting substantial sequence similarity to a nucleic acid molecule encoding a polypeptide having an amino acid sequence of SEQ ID NO: 113-259. By substantial sequence similarity it is meant a nucleic acid molecule having at least 60%, more preferably at least 70%, even more preferably at least 80% and even more preferably at least 85% sequence identity with a nucleic acid molecule encoding a CSP, such as a polypeptide having an amino acid sequence of SEQ ID NO: 113-259. In a more preferred embodiment, the similar nucleic acid molecule is one that has at least 90%, more preferably at least 95%, more preferably at least 97%, even more preferably at least 98%, and still more preferably at least 99% sequence identity with a nucleic acid molecule encoding a CSP. Most preferred in this embodiment is a nucleic acid molecule that has at least 99.5%, 99.6%, 99.7%, 99.8% or 99.9% sequence identity with a nucleic acid molecule encoding a CSP.

[0132] The nucleic acid molecules of the present invention are also inclusive of those exhibiting substantial sequence similarity to a CSNA or its complement. In this embodiment, it is preferred that the nucleic acid molecule exhibit substantial sequence similarity to a nucleic acid molecule having a nucleic acid sequence of SEQ ID NO: 1-112. By substantial sequence similarity it is meant a nucleic acid molecule that has at least 60%, more preferably at least 70%, even more preferably at least 80% and even more preferably at least 85% sequence identity with a CSNA, such as one having a nucleic acid sequence of SEQ ID NO: 1-112. More preferred is a nucleic acid molecule that has at least 90%, more preferably at least 95%, more preferably at least 97%, even more preferably at least 98%, and still more preferably at least 99% sequence identity with a CSNA. Most preferred is a nucleic acid molecule that has at least 99.5%, 99.6%, 99.7%, 99.8% or 99.9% sequence identity with a CSNA.

[0133] Nucleic acid molecules that exhibit substantial sequence similarity are inclusive of sequences that exhibit sequence identity over their entire length to a CSNA or to a nucleic acid molecule encoding a CSP, as well as sequences that are similar over only a part of its length. In this case, the part is at least 50 nucleotides of the CSNA or the nucleic acid molecule encoding a CSP, preferably at least 100 nucleotides, more preferably at least 150 or 200 nucleotides, even more preferably at least 250 or 300 nucleotides, still more preferably at least 400 or 500 nucleotides.

[0134] The substantially similar nucleic acid molecule may be a naturally occurring one that is derived from another species, especially one derived from another primate, wherein the similar nucleic acid molecule encodes an amino acid sequence that exhibits significant sequence identity to that of SEQ ID NO: 113-259 or demonstrates significant sequence identity to the nucleotide sequence of SEQ ID NO: 1-112. The similar nucleic acid molecule may also be a naturally occurring nucleic acid molecule from a human, when the CSNA is a member of a gene family. The similar nucleic acid molecule may also be a naturally occurring nucleic acid molecule derived from a non-primate, mammalian species, including without limitation, domesticated species, e.g., dog, cat, mouse, rat, rabbit, hamster, cow, horse and pig; and wild animals, e.g., monkey, fox, lions, tigers, bears, giraffes, zebras, etc. The substantially similar nucleic acid molecule may also be a naturally occurring nucleic acid molecule derived from a non-mammalian species, such as birds or reptiles. The naturally occurring substantially similar nucleic acid molecule may be isolated directly from humans or other species. In another embodiment, the substantially similar nucleic acid molecule may be one that is experimentally produced by random mutation of a nucleic acid molecule. In another embodiment, the substantially similar nucleic acid molecule may be one that is experimentally produced by directed mutation of a CSNA. In a preferred embodiment, the substantially similar nucleic acid molecule is a CSNA.

[0135] The nucleic acid molecules of the present invention are also inclusive of allelic variants of a CSNA or a nucleic acid encoding a CSP. For example, single nucleotide polymorphisms (SNPs) occur frequently in eukaryotic genomes and the sequence determined from one individual of a species may differ from other allelic forms present within the population. More than 1.4 million SNPs have already been identified in the human genome, International Human Genome Sequencing Consortium, Nature 409: 860-921 (2001)—Variants with small deletions and insertions of more than a single nucleotide are also found in the general population, and often do not alter the function of the protein. In addition, amino acid substitutions occur frequently among natural allelic variants, and often do not substantially change protein function.

[0136] In a preferred embodiment, the allelic variant is a variant of a gene, wherein the gene is transcribed into a mRNA that encodes a CSP. In a more preferred embodiment, the gene is transcribed into a mRNA that encodes a CSP comprising an amino acid sequence of SEQ ID NO: 113-259. In another preferred embodiment, the allelic variant is a variant of a gene, wherein the gene is transcribed into a mRNA that is a CSNA. In a more preferred embodiment, the gene is transcribed into a mRNA that comprises the nucleic acid sequence of SEQ ID NO: 1-112. Also preferred is that the allelic variant be a naturally occurring allelic variant in the species of interest, particularly human.

[0137] Nucleic acid molecules of the present invention are also inclusive of nucleic acid sequences comprising a part of a nucleic acid sequence of the instant invention. The part may or may not encode a polypeptide, and may or may not encode a polypeptide that is a CSP. In a preferred embodiment, the part encodes a CSP. In one embodiment, the nucleic acid molecule comprises a part of a CSNA. In another embodiment, the nucleic acid molecule comprises a part of a nucleic acid molecule that hybridizes or exhibits substantial sequence similarity to a CSNA. In another embodiment, the nucleic acid molecule comprises a part of a nucleic acid molecule that is an allelic variant of a CSNA. In yet another embodiment, the nucleic acid molecule comprises a part of a nucleic acid molecule that encodes a CSP. A part comprises at least 10 nucleotides, more preferably at least 15, 17, 18, 20, 25, 30, 35, 40, 50, 60, 70, 80, 90, 100, 150, 200, 250, 300, 350, 400 or 500 nucleotides. The maximum size of a nucleic acid part is one nucleotide shorter than the sequence of the nucleic acid molecule encoding the full-length protein.

[0138] Nucleic acid molecules of the present invention are also inclusive of nucleic acid sequences that encode fusion proteins, homologous proteins, polypeptide fragments, muteins and polypeptide analogs, as described infra.

[0139] Nucleic acid molecules of the present invention are also inclusive of nucleic acid sequences containing modifications of the native nucleic acid molecule. Examples of such modifications include, but are not limited to, normative internucleoside bonds, post-synthetic modifications or altered nucleotide analogues. One having ordinary skill in the art would recognize that the type of modification that may be made will depend upon the intended use of the nucleic acid molecule. For instance, when the nucleic acid molecule is used as a hybridization probe, the range of such modifications will be limited to those that permit sequence-discriminating base pairing of the resulting nucleic acid. When used to direct expression of RNA or protein in vitro or in vivo, the range of such modifications will be limited to those that permit the nucleic acid to function properly as a polymerization substrate. When the isolated nucleic acid is used as a therapeutic agent, the modifications will be limited to those that do not confer toxicity upon the isolated nucleic acid.

[0140] Accordingly, in one embodiment, a nucleic acid molecule may include nucleotide analogues that incorporate labels that are directly detectable, such as radiolabels or fluorophores, or nucleotide analogues that incorporate labels that can be visualized in a subsequent reaction, such as biotin or various haptens. The labeled nucleic acid molecules are particularly useful as hybridization probes.

[0141] Common radiolabeled analogues include those labeled with ³³P, ³²P, and ³⁵S, such as α-³²P-dATP, α-³²P-dCTP, α-³²P-dGTP, α-³²P-dTTP, α-³²P-3′dATP, α-³²P-ATP, α-³²P-CTP, α-³²P-GTP, α-³²P-UTP, α-³⁵S-dATP, γ-³⁵S-GTP, γ-³³P-dATP, and the like.

[0142] Commercially available fluorescent nucleotide analogues readily incorporated into the nucleic acids of the present invention include Cy3-dCTP, Cy3-dUTP, Cy5-dCTP, Cy3-dUTP (Amersham Biosciences, Piscataway, N.J., USA), fluorescein-12-dUTP, tetramethylrhodamine-6-dUTP, Texas Red®-5-dUTP, Cascade Blue®-7-dUTP, BODIPY® FL-14-dUTP, BODIPY® TMR-14-dUTP, BODIPY® TR-14-dUTP, Rhodamine Green™-5-dUTP, Oregon Green® 488-5-dUTP, Texas Red®-12-dUTP, BODIPY® 630/650-14-dUTP, BODIPY® 650/665-14-dUTP, Alexa Fluor® 488-5-dUTP, Alexa Fluor® 532-5-dUTP, Alexa Fluor® 568-5-dUTP, Alexa Fluor® 594-5-dUTP, Alexa Fluor® 546-14-dUTP, fluorescein-12-UTP, tetramethylrhodamine-6-UTP, Texas Red®-5-UTP, Cascade Blue®-7-UTP, BODIPY® FL-14-UTP, BODIPY® TMR-14-UTP, BODIPY® TR-14-UTP, Rhodamine Green™-5-UTP, Alexa Fluor® 488-5-UTP, Alexa Fluor® 546-14-UTP (Molecular Probes, Inc. Eugene, Oreg., USA). One may also custom synthesize nucleotides having other fluorophores. See Henegariu et al., Nature Biotechnol. 18: 345-348 (2000).

[0143] Haptens that are commonly conjugated to nucleotides for subsequent labeling include biotin (biotin-11-dUTP, Molecular Probes, Inc., Eugene, Oreg., USA; biotin-21-UTP, biotin-21-dUTP, Clontech Laboratories, Inc., Palo Alto, Calif., USA), digoxigenin (DIG-11-dUTP, alkali labile, DIG-11-UTP, Roche Diagnostics Corp., Indianapolis, Ind., USA), and dinitrophenyl(dinitrophenyl-11-dUTP, Molecular Probes, Inc., Eugene, Oreg., USA).

[0144] Nucleic acid molecules of the present invention can be labeled by incorporation of labeled nucleotide analogues into the nucleic acid. Such analogues can be incorporated by enzymatic polymerization, such as by nick translation, random priming, polymerase chain reaction (PCR), terminal transferase tailing, and end-filling of overhangs, for DNA molecules, and in vitro transcription driven, e.g. from phage promoters, such as T7, T3, and SP6, for RNA molecules. Commercial kits are readily available for each such labeling approach. Analogues can also be incorporated during automated solid phase chemical synthesis. Labels can also be incorporated after nucleic acid synthesis, with the 5′ phosphate and 3′ hydroxyl providing convenient sites for post-synthetic covalent attachment of detectable labels.

[0145] Other post-synthetic approaches also permit internal labeling of nucleic acids. For example, fluorophores can be attached using a cisplatin reagent that reacts with the N7 of guanine residues (and, to a lesser extent, adenine bases) in DNA, RNA, and Peptide Nucleic Acids (PNA) to provide a stable coordination complex between the nucleic acid and fluorophore label (Universal Linkage System) (available from Molecular Probes, Inc., Eugene, Oreg., USA and Amersham Pharmacia Biotech, Piscataway, N.J., USA); see Alers et al., Genes, Chromosomes & Cancer 25: 301-305 (1999); Jelsma et al., J. NIH Res. 5: 82 (1994); Van Belkum et al., BioTechniques 16: 148-153 (1994). Alternatively, nucleic acids can be labeled using a disulfide-containing linker (FastTag™ Reagent, Vector Laboratories, Inc., Burlingame, Calif., USA) that is photo- or thermally coupled to the target nucleic acid using aryl azide chemistry; after reduction, a free thiol is available for coupling to a hapten, fluorophore, sugar, affinity ligand, or other marker.

[0146] One or more independent or interacting labels can be incorporated into the nucleic acid molecules of the present invention. For example, both a fluorophore and a moiety that in proximity thereto acts to quench fluorescence can be included to report specific hybridization through release of fluorescence quenching or to report exonucleotidic excision. See, e.g., Tyagi et al., Nature Biotechnol. 14: 303-308 (1996); Tyagi et al., Nature Biotechnol. 16: 49-53 (1998); Sokol et al., Proc. Natl. Acad. Sci. USA 95: 11538-11543 (1998); Kostrikis et al., Science 279: 1228-1229 (1998); Marras et al., Genet. Anal 14: 151-156 (1999); Holland et al., Proc. Natl. Acad. Sci. USA 88: 7276-7280 (1991); Heid et al., Genome Res. 6(10): 986-94 (1996); Kuimelis et al., Nucleic Acids Symp. Ser. (37): 255-6 (1997); and U.S. Pat. Nos. 5,846,726, 5,925,517, 5,925,517, 5,723,591 and 5,538,848, the disclosures of which are incorporated herein by reference in their entireties.

[0147] Nucleic acid molecules of the present invention may also be modified by altering one or more native phosphodiester internucleoside bonds to more nuclease-resistant, internucleoside bonds. See Hartmann et al. (eds.), Manual of Antisense Methodology: Perspectives in Antisense Science, Kluwer Law International (1999); Stein et al. (eds.), Applied Antisense Oligonucleotide Technology, Wile-Liss (1998); Chadwick et al. (eds.), Oligonucleotides as Therapeutic Agents—Symposium No. 209, John Wiley & Son Ltd (1997). Such altered internucleoside bonds are often desired for techniques or for targeted gene correction, Gamper et al., Nucl. Acids Res. 28(21): 4332-4339 (2000). For double-stranded RNA inhibition which may utilize either natural ds RNA or ds RNA modified in its, sugar, phosphate or base, see Hannon, Nature 418(11): 244-251 (2002); Fire et al. in WO 99/32619; Tuschl et al. in US2002/0086356; Kruetzer et al. in WO 00/44895, the disclosures of which are incorporated herein by reference in their entirety. For circular antisense, see Kool in U.S. Pat. No. 5,426,180, the disclosure of which is incorporated herein by reference in its entirety.

[0148] Modified oligonucleotide backbones include, without limitation, phosphorothioates, chiral phosphorothioates, phosphorodithioates, phosphotriesters, aminoalkylphosphotriesters, methyl and other alkyl phosphonates including 3″-alkylene phosphonates and chiral phosphonates, phosphinates, phosphoramidates including 3-amino phosphoramidate and aminoalkylphosphoramidates, thionophosphoramidates, thionoalkylphosphonates, thionoalkylphosphotriesters, and boranophosphates having normal 3′-5′ linkages, 2′-5′ linked analogs of these, and those having inverted polarity wherein the adjacent pairs of nucleoside units are linked 3′-5′ to 5′-3′ or 2′-5′ to 5′-2′. Representative U.S. Patents that teach the preparation of the above phosphorus-containing linkages include, but are not limited to, U.S. Pat. Nos. 3,687,808; 4,469,863; 4,476,301; 5,023,243; 5,177,196; 5,188,897; 5,264,423; 5,276,019; 5,278,302; 5,286,717; 5,321,131; 5,399,676; 5,405,939; 5,453,496; 5,455,233; 5,466,677; 5,476,925; 5,519,126; 5,536,821; 5,541,306; 5,550,111; 5,563,253; 5,571,799; 5,587,361; and 5,625,050, the disclosures of which are incorporated herein by reference in their entireties. In a preferred embodiment, the modified internucleoside linkages may be used for antisense techniques.

[0149] Other modified oligonucleotide backbones do not include a phosphorus atom, but have backbones that are formed by short chain alkyl or cycloalkyl internucleoside linkages, mixed heteroatom and alkyl or cycloalkyl internucleoside linkages, or one or more short chain heteroatomic or heterocyclic internucleoside linkages. These include those having morpholino linkages (formed in part from the sugar portion of a nucleoside); siloxane backbones; sulfide, sulfoxide and sulfone backbones; formacetyl and thioformacetyl backbones; methylene formacetyl and thioformacetyl backbones; alkene containing backbones; sulfamate backbones; methyleneimino and methylenehydrazino backbones; sulfonate and sulfonamide backbones; amide backbones; and others having mixed N, O, S and CH₂ component parts. Representative U.S. patents that teach the preparation of the above backbones include, but are not limited to, U.S. Pat. Nos. 5,034,506; 5,166,315; 5,185,444; 5,214,134; 5,216,141; 5,235,033; 5,264,562; 5,264,564; 5,405,938; 5,434,257; 5,466,677; 5,470,967; 5,489,677; 5,541,307; 5,561,225; 5,596,086; 5,602,240; 5,610,289; 5,602,240; 5,608,046; 5,610,289; 5,618,704; 5,623,070; 5,663,312; 5,633,360; 5,677,437 and 5,677,439; the disclosures of which are incorporated herein by reference in their entireties.

[0150] In other preferred nucleic acid molecules, both the sugar and the internucleoside linkage are replaced with novel groups, such as peptide nucleic acids (PNA). In PNA compounds, the phosphodiester backbone of the nucleic acid is replaced with an amide-containing backbone, in particular by repeating N-(2-aminoethyl)glycine units linked by amide bonds. Nucleobases are bound directly or indirectly to aza nitrogen atoms of the amide portion of the backbone, typically by methylene carbonyl linkages. PNA can be synthesized using a modified peptide synthesis protocol. PNA oligomers can be synthesized by both Fmoc and tBoc methods. Representative U.S. patents that teach the preparation of PNA compounds include, but are not limited to, U.S. Pat. Nos. 5,539,082; 5,714,331; and 5,719,262, each of which is herein incorporated by reference in its entirety. Automated PNA synthesis is readily achievable on commercial synthesizers (see, e.g., “PNA User's Guide,” Rev. 2, February 1998, Perseptive Biosystems Part No. 60138, Applied Biosystems, Inc., Foster City, Calif.). PNA molecules are advantageous for a number of reasons. First, because the PNA backbone is uncharged, PNA/DNA and PNA/RNA duplexes have a higher thermal stability than is found in DNA/DNA and DNA/RNA duplexes. The Tm of a PNA/DNA or PNA/RNA duplex is generally 1° C. higher per base pair than the Tm of the corresponding DNA/DNA or DNA/RNA duplex (in 100 mM NaCl). Second, PNA molecules can also form stable PNA/DNA complexes at low ionic strength, under conditions in which DNA/DNA duplex formation does not occur. Third, PNA also demonstrates greater specificity in binding to complementary DNA because a PNA/DNA mismatch is more destabilizing than DNA/DNA mismatch. A single mismatch in mixed a PNA/DNA 15-mer lowers the Tm by 8-20° C. (15° C. on average). In the corresponding DNA/DNA duplexes, a single mismatch lowers the Tm by 14-16° C. (11° C. on average). Because PNA probes can be significantly shorter than DNA probes, their specificity is greater. Fourth, PNA oligomers are resistant to degradation by enzymes, and the lifetime of these compounds is extended both in vivo and in vitro because nucleases and proteases do not recognize the PNA polyamide backbone with nucleobase sidechains. See, e.g., Ray et al., FASEB J. 14(9): 1041-60 (2000); Nielsen et al., Pharmacol Toxicol. 86(1): 3-7 (2000); Larsen et al., Biochim Biophys Acta. 1489(1): 159-66 (1999); Nielsen, Curr. Opin. Struct. Biol. 9(3): 353-7 (1999), and Nielsen, Curr. Opin. Biotechnol. 10(1): 71-5 (1999).

[0151] Nucleic acid molecules may be modified compared to their native structure throughout the length of the nucleic acid molecule or can be localized to discrete portions thereof. As an example of the latter, chimeric nucleic acids can be synthesized that have discrete DNA and RNA domains and that can be used for targeted gene repair and modified PCR reactions, as further described in, Misra et al., Biochem. 37: 1917-1925 (1998); and Finn et al., Nucl. Acids Res. 24: 3357-3363 (1996), and U.S. Pat. Nos. 5,760,012 and 5,731,181, the disclosures of which are incorporated herein by reference in their entireties.

[0152] Unless otherwise specified, nucleic acid molecules of the present invention can include any topological conformation appropriate to the desired use; the term thus explicitly comprehends, among others, single-stranded, double-stranded, triplexed, quadruplexed, partially double-stranded, partially-triplexed, partially-quadruplexed, branched, hairpinned, circular, and padlocked conformations. Padlocked conformations and their utilities are further described in Banér et al., Curr. Opin. Biotechnol. 12: 11-15 (2001); Escude et al., Proc. Natl. Acad. Sci. USA 14: 96(19):10603-7 (1999); and Nilsson et al., Science 265(5181): 2085-8 (1994). Triplexed and quadruplexed conformations, and their utilities, are reviewed in Praseuth et al., Biochim. Biophys. Acta. 1489(1): 181-206 (1999); Fox, Curr. Med. Chem. 7(1): 17-37 (2000); Kochetkova et al., Methods Mol. Biol. 130: 189-201 (2000); Chan et al., J. Mol. Med. 75(4): 267-82 (1997); Rowley et al., Mol Med 5(10): 693-700 (1999); Kool, Annu Rev Biophys Biomol Struct. 25: 1-28 (1996).

[0153] SNP Polymorphisms

[0154] Commonly, sequence differences between individuals involve differences in single nucleotide positions. SNPs may account for 90% of human DNA polymorphism. Collins et al., 8 Genome Res. 1229-31 (1998). SNPs include single base pair positions in genomic DNA at which different sequence alternatives (alleles) exist in a population. In addition, the least frequent allele generally must occur at a frequency of 1% or greater. DNA sequence variants with a reasonably high population frequency are observed approximately every 1,000 nucleotide across the genome, with estimates as high as 1 SNP per 350 base pairs. Wang et al., 280 Science 1077-82 (1998); Harding et al., 60 Am. J. Human Genet. 772-89 (1997); Taillon-Miller et al., 8 Genome Res. 748-54 (1998); Cargill et al., 22 Nat. Genet. 231-38 (1999); and Semple et al., 16 Bioinform. Disc. Note 735-38 (2000). The frequency of SNPs varies with the type and location of the change. In base substitutions, two-thirds of the substitutions involve the C-T and G-A type. This variation in frequency can be related to 5-methylcytosine deamination reactions that occur frequently, particularly at CpG dinucleotides. Regarding location, SNPs occur at a much higher frequency in non-coding regions than in coding regions. Information on over one million variable sequences is already publicly available via the Internet and more such markers are available from commercial providers of genetic information. Kwok and Gu, 5 Med. Today 538-53 (1999).

[0155] Several definitions of SNPs exist. See, e.g., Brooks, 235 Gene 177-86 (1999). As used herein, the term “single nucleotide polymorphism” or “SNP” includes all single base variants, thus including nucleotide insertions and deletions in addition to single nucleotide substitutions. There are two types of nucleotide substitutions. A transition is the replacement of one purine by another purine or one pyrimidine by another pyrimidine. A transversion is the replacement of a purine for a pyrimidine, or vice versa.

[0156] Numerous methods exist for detecting SNPs within a nucleotide sequence. A review of many of these methods can be found in Landegren et al., 8 Genome Res. 769-76 (1998). For example, a SNP in a genomic sample can be detected by preparing a Reduced Complexity Genome (RCG) from the genomic sample, then analyzing the RCG for the presence or absence of a SNP. See, e.g., WO 00/18960 which is herein incorporated by reference in its entirety. Multiple SNPs in a population of target polynucleotides in parallel can be detected using, for example, the methods of WO 00/50869 which is herein incorporated by reference in its entirety. Other SNP detection methods include the methods of U.S. Pat. Nos. 6,297,018 and 6,322,980 which are herein incorporated by reference in their entirety. Furthermore, SNPs can be detected by restriction fragment length polymorphism (RFLP) analysis. See, e.g., U.S. Pat. Nos. 5,324,631; 5,645,995 which are herein incorporated by reference in their entirety. RFLP analysis of SNPs, however, is limited to cases where the SNP either creates or destroys a restriction enzyme cleavage site. SNPs can also be detected by direct sequencing of the nucleotide sequence of interest. In addition, numerous assays based on hybridization have also been developed to detect SNPs and mismatch distinction by polymerases and ligases. Several web sites provide information about SNPs including Ensembl on the World Wide Web at ensemble.org, Sanger Institute on the World Wide Web at sanger.ac.uk/genetics/exon/, National Center for Biotechnology Information (NCBI) on the World Wide Web at ncbi.nlm.nih.gov/SNP/, The SNP Consortium Ltd. on the World Wide Web at snp.cshl.org. The chromosomal locations for the compositions disclosed herein are provided below. In addition, one of ordinary skill in the art could use a BLAST against the genome or any of the databases cited above to find the chromosomal location. Another a preferred method to find the genomic coordinates and associated SNPs would be to use the BLAT tool (genome.ucsc.edu, Kent et al. 2001, The Human Genome Browser at UCSC, Genome Research 996-1006 or Kent 2002 BLAT—The BLAST-Like Alignment Tool Genome Reseach, 1-9). All web sites above were accessed Dec. 3, 2003.

[0157] RNA interference

[0158] RNA interference refers to the process of sequence-specific post transcriptional gene silencing in animals mediated by short interfering RNAs (siRNA). Fire et al., 1998, Nature, 391, 806. The corresponding process in plants is commonly referred to as post transcriptional gene silencing or RNA silencing and is also referred to as quelling in fungi. The process of post transcriptional gene silencing is thought to be an evolutionarily conserved cellular defense mechanism used to prevent the expression of foreign genes which is commonly shared by diverse flora and phyla. Fire et al., 1999, Trends Genet., 15, 358. Such protection from foreign gene expression may have evolved in response to the production of double-stranded RNAs (dsRNA) derived from viral infection or the random integration of transposon elements into a host genome via a cellular response that specifically destroys homologous single-stranded RNA or viral genomic RNA. The presence of dsRNA in cells triggers the RNAi response though a mechanism that has yet to be fully characterized. This mechanism appears to be different from the interferon response that results from dsRNA mediated activation of protein kinase PKR and 2′,5′-oligoadenylate synthetase resulting in non-specific cleavage of mRNA by ribonuclease L.

[0159] The presence of long dsRNAs in cells stimulates the activity of a ribonuclease III enzyme referred to as dicer. Dicer is involved in the processing of the dsRNA into short pieces of dsRNA known as short interfering RNAs (siRNA). Berstein et al., 2001, Nature, 409, 363. Short interfering RNAs derived from dicer activity are typically about 21-23 nucleotides in length and comprise about 19 base pair duplexes. Dicer has also been implicated in the excision of 21 and 22 nucleotide small temporal RNAs (stRNA) from precursor RNA of conserved structure that are implicated in translational control. Hutvagner et al., 2001, Science, 293, 834. The RNAi response also features an endonuclease complex containing a siRNA, commonly referred to as an RNA-induced silencing complex (RISC), which mediates cleavage of single-stranded RNA having sequence complementary to the antisense strand of the siRNA duplex. Cleavage of the target RNA takes place in the middle of the region complementary to the antisense strand of the siRNA duplex. Elbashir et al., 2001, Genes Dev., 15, 188.

[0160] Short interfering RNA mediated RNAi has been studied in a variety of systems. Fire et al., 1998, Nature, 391, 806, were the first to observe RNAi in C. Elegans. Wianny and Goetz, 1999, Nature Cell Biol., 2, 70, describe RNAi mediated by dsRNA in mouse embryos. Hammond et al., 2000, Nature, 404, 293, describe RNAi in Drosophila cells transfected with dsRNA. Elbashir et al., 2001, Nature, 411, 494, describe RNAi induced by introduction of duplexes of synthetic 21-nucleotide RNAs in cultured mammalian cells including human embryonic kidney and HeLa cells. Recent work in Drosophila embryonic lysates (Elbashir et al., 2001, EMBO J., 20, 6877) has revealed certain requirements for siRNA length, structure, chemical composition, and sequence that are essential to mediate efficient RNAi activity. These studies have shown that 21 nucleotide siRNA duplexes are most active when containing two nucleotide 3′-overhangs. Furthermore, complete substitution of one or both siRNA strands with 2′-deoxy(2′-H) or 2′-O-methyl nucleotides abolishes RNAi activity, whereas substitution of the 3′-terminal siRNA overhang nucleotides with deoxy nucleotides (2′-H) was shown to be tolerated. Single mismatch sequences in the center of the siRNA duplex were also shown to abolish RNAi activity. In addition, these studies also indicate that the position of the cleavage site in the target RNA is defined by the 5′-end of the siRNA guide sequence rather than the 3′-end. Elbashir et al., 2001, EMBO J., 20, 6877. Other studies have indicated that a 5′-phosphate on the target-complementary strand of a siRNA duplex is required for siRNA activity and that ATP is utilized to maintain the 5′-phosphate moiety on the siRNA. Nykanen et al., 2001, Cell, 107, 309.

[0161] Studies have shown that replacing the 3′-overhanging segments of a 21-mer siRNA duplex having 2 nucleotide 3′ overhangs with deoxyribonucleotides does not have an adverse effect on RNAi activity. Replacing up to 4 nucleotides on each end of the siRNA with deoxyribonucleotides has been reported to be well tolerated whereas complete substitution with deoxyribonucleotides results in no RNAi activity. Elbashir et al., 2001, EMBO J., 20, 6877. In addition, Elbashir et al., supra, also report that substitution of siRNA with 2′-O-methyl nucleotides completely abolishes RNAi activity. Li et al., WO 00/44914, and Beach et al., WO 01/68836 both suggest that siRNA “may include modifications to either the phosphate-sugar back bone or the nucleoside to include at least one of a nitrogen or sulfur heteroatom”, however neither application teaches to what extent these modifications are tolerated in siRNA molecules nor provide any examples of such modified siRNA. Kreutzer and Limmer, Canadian Patent Application No. 2,359,180, also describe certain chemical modifications for use in dsRNA constructs in order to counteract activation of double-stranded RNA-dependent protein kinase PKR, specifically 2′-amino or 2′-O-methyl nucleotides, and nucleotides containing a 2′-O or 4′-C methylene bridge. However, Kreutzer and Limmer similarly fail to show to what extent these modifications are tolerated in siRNA molecules nor do they provide any examples of such modified siRNA.

[0162] Parrish et al., 2000, Molecular Cell, 6, 1977-1087, tested certain chemical modifications targeting the unc-22 gene in C. elegans using long (>25 nt) siRNA transcripts. The authors describe the introduction of thiophosphate residues into these siRNA transcripts by incorporating thiophosphate nucleotide analogs with T7 and T3 RNA polymerase and observed that “RNAs with two [phosphorothioate] modified bases also had substantial decreases in effectiveness as RNAi triggers; [phosphorothioate] modification of more than two residues greatly destabilized the RNAs in vitro and we were not able to assay interference activities.” Parrish et al. at 1081. The authors also tested certain modifications at the 2′-position of the nucleotide sugar in the long siRNA transcripts and observed that substituting deoxynucleotides for ribonucleotides “produced a substantial decrease in interference activity”, especially in the case of Uridine to Thymidine and/or Cytidine to deoxy-Cytidine substitutions. Parrish et al. In addition, the authors tested certain base modifications, including substituting 4-thiouracil, 5-bromouracil, 5-iodouracil, 3-(aminoallyl)uracil for uracil, and inosine for guanosine in sense and antisense strands of the siRNA, and found that whereas 4-thiouracil and 5-bromouracil were all well tolerated, inosine “produced a substantial decrease in interference activity” when incorporated in either strand. Incorporation of 5-iodouracil and 3-(aminoallyl)uracil in the antisense strand resulted in substantial decrease in RNAi activity as well.

[0163] Beach et al., WO 01/68836, describes specific methods for attenuating gene expression using endogenously derived dsRNA. Tuschl et al., WO 01/75164, describes a Drosophila in vitro RNAi system and the use of specific siRNA molecules for certain functional genomic and certain therapeutic applications; although Tuschl, 2001, Chem. Biochem., 2, 239-245, doubts that RNAi can be used to cure genetic diseases or viral infection due “to the danger of activating interferon response”. Li et al., WO 00/44914, describes the use of specific dsRNAs for use in attenuating the expression of certain target genes. Zernicka-Goetz et al., WO 01/36646, describes certain methods for inhibiting the expression of particular genes in mammalian cells using certain dsRNA molecules. Fire et al., WO 99/32619, U.S. Pat. No. 6,506,559, the contents of which are hereby incorporated by reference in their entirety, describes particular methods for introducing certain dsRNA molecules into cells for use in inhibiting gene expression. Plaetinck et al., WO 00/01846, describes certain methods for identifying specific genes responsible for conferring a particular phenotype in a cell using specific dsRNA molecules. Mello et al., WO 01/29058, describes the identification of specific genes involved in dsRNA mediated RNAi. Deschamps Depaillette et al., International PCT Publication No. WO 99/07409, describes specific compositions consisting of particular dsRNA molecules combined with certain anti-viral agents. Driscoll et al., International PCT Publication No. WO 01/49844, describes specific DNA constructs for use in facilitating gene silencing in targeted organisms. Parrish et al., 2000, Molecular Cell, 6, 1977-1087, describes specific chemically modified siRNA constructs targeting the unc-22 gene of C. elegans. Tuschl et al., International PCT Publication No. WO 02/44321, describe certain synthetic siRNA constructs.

[0164] Methods for Using Nucleic Acid Molecules as Probes and Primers

[0165] The isolated nucleic acid molecules of the present invention can be used as hybridization probes to detect, characterize, and quantify hybridizing nucleic acids in, and isolate hybridizing nucleic acids from, both genomic and transcript-derived nucleic acid samples. When free in solution, such probes are typically, but not invariably, detectably labeled; bound to a substrate, as in a microarray, such probes are typically, but not invariably unlabeled.

[0166] In one embodiment, the isolated nucleic acid molecules of the present invention can be used as probes to detect and characterize gross alterations in the gene of a CSNA, such as deletions, insertions, translocations, and duplications of the CSNA genomic locus through fluorescence in situ hybridization (FISH) to chromosome spreads. See, e.g., Andreeff et al. (eds.), Introduction to Fluorescence In Situ Hybridization: Principles and Clinical Applications, John Wiley & Sons (1999). The isolated nucleic acid molecules of the present invention can be used as probes to assess smaller genomic alterations using, e.g., Southern blot detection of restriction fragment length polymorphisms. The isolated nucleic acid molecules of the present invention can be used as probes to isolate genomic clones that include a nucleic acid molecule of the present invention, which thereafter can be restriction mapped and sequenced to identify deletions, insertions, translocations, and substitutions (single nucleotide polymorphisms, SNPs) at the sequence level. Alternatively, detection techniques such as molecular beacons may be used, see Kostrikis et al. Science 279:1228-1229 (1998).

[0167] The isolated nucleic acid molecules of the present invention can also be used as probes to detect, characterize, and quantify CSNA in, and isolate CSNA from, transcript-derived nucleic acid samples. In one embodiment, the isolated nucleic acid molecules of the present invention can be used as hybridization probes to detect, characterize by length, and quantify mRNA by Northern blot of total or poly-A⁺-selected RNA samples. In another embodiment, the isolated nucleic acid molecules of the present invention can be used as hybridization probes to detect, characterize by location, and quantify mRNA by in situ hybridization to tissue sections. See, e.g., Schwarchzacher et al., In Situ Hybridization, Springer-Verlag New York (2000). In another preferred embodiment, the isolated nucleic acid molecules of the present invention can be used as hybridization probes to measure the representation of clones in a cDNA library or to isolate hybridizing nucleic acid molecules acids from cDNA libraries, permitting sequence level characterization of RNAs that hybridize to CSNAs, including, without limitations, identification of deletions, insertions, substitutions, truncations, alternatively spliced forms and single nucleotide polymorphisms. In yet another preferred embodiment, the nucleic acid molecules of the instant invention may be used in microarrays.

[0168] All of the aforementioned probe techniques are well within the skill in the art, and are described at greater length in standard texts such as Sambrook (2001), supra; Ausubel (1999), supra; and Walker et al. (eds.), The Nucleic Acids Protocols Handbook, Humana Press (2000).

[0169] In another embodiment, a nucleic acid molecule of the invention may be used as a probe or primer to identify and/or amplify a second nucleic acid molecule that selectively hybridizes to the nucleic acid molecule of the invention. In this embodiment, it is preferred that the probe or primer be derived from a nucleic acid molecule encoding a CSP. More preferably, the probe or primer is derived from a nucleic acid molecule encoding a polypeptide having an amino acid sequence of SEQ ID NO: 113-259. Also preferred are probes or primers derived from a CSNA. More preferred are probes or primers derived from a nucleic acid molecule having a nucleotide sequence of SEQ ID NO: 1-112.

[0170] In general, a probe or primer is at least 10 nucleotides in length, more preferably at least 12, more preferably at least 14 and even more preferably at least 16 or 17 nucleotides in length. In an even more preferred embodiment, the probe or primer is at least 18 nucleotides in length, even more preferably at least 20 nucleotides and even more preferably at least 22 nucleotides in length. Primers and probes may also be longer in length. For instance, a probe or primer may be 25 nucleotides in length, or may be 30, 40 or 50 nucleotides in length. Methods of performing nucleic acid hybridization using oligonucleotide probes are well known in the art. See, e.g., Sambrook et al., 1989, supra, Chapter 11 and pp. 11.31-11.32 and 11.40-11.44, which describes radiolabeling of short probes, and pp. 11.45-11.53, which describe hybridization conditions for oligonucleotide probes, including specific conditions for probe hybridization (pp. 11.50-11.51).

[0171] Methods of performing primer-directed amplification are also well known in the art. Methods for performing the polymerase chain reaction (PCR) are compiled, inter alia, in McPherson, PCR Basics: From Background to Bench, Springer Verlag (2000); Innis et al. (eds.), PCR Applications: Protocols for Functional Genomics, Academic Press (1999); Gelfand et al. (eds.), PCR Strategies, Academic Press (1998); Newton et al., PCR, Springer-Verlag New York (1997); Burke (ed.), PCR: Essential Techniques, John Wiley & Son Ltd (1996); White (ed.), PCR Cloning Protocols: From Molecular Cloning to Genetic Engineering, Vol. 67, Humana Press (1996); and McPherson et al. (eds.), PCR 2: A Practical Approach, Oxford University Press, Inc. (1995). Methods for performing RT-PCR are collected, e.g., in Siebert et al. (eds.), Gene Cloning and Analysis by RT-PCR, Eaton Publishing Company/Bio Techniques Books Division, 1998; and Siebert (ed.), PCR Technique:RT-PCR, Eaton Publishing Company/BioTechniques Books (1995).

[0172] PCR and hybridization methods may be used to identify and/or isolate nucleic acid molecules of the present invention including allelic variants, homologous nucleic acid molecules and fragments. PCR and hybridization methods may also be used to identify, amplify and/or isolate nucleic acid molecules of the present invention that encode homologous proteins, analogs, fusion proteins or muteins of the invention. Nucleic acid primers as described herein can be used to prime amplification of nucleic acid molecules of the invention, using transcript-derived or genomic DNA as the template.

[0173] These nucleic acid primers can also be used, for example, to prime single base extension (SBE) for SNP detection (See, e.g., U.S. Pat. No. 6,004,744, the disclosure of which is incorporated herein by reference in its entirety).

[0174] Isothermal amplification approaches, such as rolling circle amplification, are also now well-described. See, e.g., Schweitzer et al., Curr. Opin. Biotechnol. 12(1): 21-7 (2001); International Patent publications WO 97/19193 and WO 00/15779, and U.S. Pat. Nos. 5,854,033 and 5,714,320, the disclosures of which are incorporated herein by reference in their entireties. Rolling circle amplification can be combined with other techniques to facilitate SNP detection. See, e.g., Lizardi et al., Nature Genet. 19(3): 225-32 (1998).

[0175] Nucleic acid molecules of the present invention may be bound to a substrate either covalently or noncovalently. The substrate can be porous or solid, planar or non-planar, unitary or distributed. The bound nucleic acid molecules may be used as hybridization probes, and may be labeled or unlabeled. In a preferred embodiment, the bound nucleic acid molecules are unlabeled.

[0176] In one embodiment, the nucleic acid molecule of the present invention is bound to a porous substrate, e.g., a membrane, typically comprising nitrocellulose, nylon, or positively charged derivatized nylon. The nucleic acid molecule of the present invention can be used to detect a hybridizing nucleic acid molecule that is present within a labeled nucleic acid sample, e.g., a sample of transcript-derived nucleic acids. In another embodiment, the nucleic acid molecule is bound to a solid substrate, including, without limitation, glass, amorphous silicon, crystalline silicon or plastics. Examples of plastics include, without limitation, polymethylacrylic, polyethylene, polypropylene, polyacrylate, polymethylmethacrylate, polyvinylchloride, polytetrafluoroethylene, polystyrene, polycarbonate, polyacetal, polysulfone, celluloseacetate, cellulosenitrate, nitrocellulose, or mixtures thereof. The solid substrate may be any shape, including rectangular, disk-like and spherical. In a preferred embodiment, the solid substrate is a microscope slide or slide-shaped substrate.

[0177] The nucleic acid molecule of the present invention can be attached covalently to a surface of the support substrate or applied to a derivatized surface in a chaotropic agent that facilitates denaturation and adherence by presumed noncovalent interactions, or some combination thereof. The nucleic acid molecule of the present invention can be bound to a substrate to which a plurality of other nucleic acids are concurrently bound, hybridization to each of the plurality of bound nucleic acids being separately detectable. At low density, e.g. on a porous membrane, these substrate-bound collections are typically denominated macroarrays; at higher density, typically on a solid support, such as glass, these substrate bound collections of plural nucleic acids are colloquially termed microarrays. As used herein, the term microarray includes arrays of all densities. It is, therefore, another aspect of the invention to provide microarrays that comprise one or more of the nucleic acid molecules of the present invention.

[0178] In yet another embodiment, the invention is directed to single exon probes based on the CSNAs disclosed herein.

[0179] Expression Vectors, Host Cells and Recombinant Methods of Producing Polypeptides

[0180] Another aspect of the present invention provides vectors that comprise one or more of the isolated nucleic acid molecules of the present invention, and host cells in which such vectors have been introduced.

[0181] The vectors can be used, inter alia, for propagating the nucleic acid molecules of the present invention in host cells (cloning vectors), for shuttling the nucleic acid molecules of the present invention between host cells derived from disparate organisms (shuttle vectors), for inserting the nucleic acid molecules of the present invention into host cell chromosomes (insertion vectors), for expressing sense or antisense RNA transcripts of the nucleic acid molecules of the present invention in vitro or within a host cell, and for expressing polypeptides encoded by the nucleic acid molecules of the present invention, alone or as fusion proteins with heterologous polypeptides (expression vectors). Vectors are by now well known in the art, and are described, inter alia, in Jones et al. (eds.), Vectors: Cloning Applications: Essential Techniques (Essential Techniques Series), John Wiley & Son Ltd. (1998); Jones et al. (eds.), Vectors: Expression Systems: Essential Techniques (Essential Techniques Series), John Wiley & Son Ltd. (1998); Gacesa et al., Vectors: Essential Data, John Wiley & Sons Ltd. (1995); Cid-Arregui (eds.), Viral Vectors: Basic Science and Gene Therapy, Eaton Publishing Co. (2000); Sambrook (2001), supra; Ausubel (1999), supra. Furthermore, a variety of vectors are available commercially. Use of existing vectors and modifications thereof are well within the skill in the art. Thus, only basic features need be described here.

[0182] Nucleic acid sequences may be expressed by operatively linking them to an expression control sequence in an appropriate expression vector and employing that expression vector to transform an appropriate unicellular host. Expression control sequences are sequences that control the transcription, post-transcriptional events and translation of nucleic acid sequences. Such operative linking of a nucleic acid sequence of this invention to an expression control sequence, of course, includes, if not already part of the nucleic acid sequence, the provision of a translation initiation codon, ATG or GTG, in the correct reading frame upstream of the nucleic acid sequence.

[0183] A wide variety of host/expression vector combinations may be employed in expressing the nucleic acid sequences of this invention. Useful expression vectors, for example, may consist of segments of chromosomal, non-chromosomal and synthetic nucleic acid sequences.

[0184] In one embodiment, prokaryotic cells may be used with an appropriate vector. Prokaryotic host cells are often used for cloning and expression. In a preferred embodiment, prokaryotic host cells include E. coli, Pseudomonas, Bacillus and Streptomyces. In a preferred embodiment, bacterial host cells are used to express the nucleic acid molecules of the instant invention. Useful expression vectors for bacterial hosts include bacterial plasmids, such as those from E. coli, Bacillus or Streptomyces, including pBluescript, pGEX-2T, pUC vectors, col E1, pCR1, pBR322, pMB9 and their derivatives, wider host range plasmids, such as RP4, phage DNAs, e.g., the numerous derivatives of phage lambda, e.g., NM989, λGT10 and λGT11, and other phages, e.g., M13 and filamentous single-stranded phage DNA. Where E. coli is used as host, selectable markers are, analogously, chosen for selectivity in gram negative bacteria: e.g., typical markers confer resistance to antibiotics, such as ampicillin, tetracycline, chloramphenicol, kanamycin, streptomycin and zeocin; auxotrophic markers can also be used.

[0185] In other embodiments, eukaryotic host cells, such as yeast, insect, mammalian or plant cells, may be used. Yeast cells, typically S. cerevisiae, are useful for eukaryotic genetic studies, due to the ease of targeting genetic changes by homologous recombination and the ability to easily complement genetic defects using recombinantly expressed proteins. Yeast cells are useful for identifying interacting protein components, e.g. through use of a two-hybrid system. In a preferred embodiment, yeast cells are useful for protein expression. Vectors of the present invention for use in yeast will typically, but not invariably, contain an origin of replication suitable for use in yeast and a selectable marker that is functional in yeast. Yeast vectors include Yeast Integrating plasmids (e.g., YIp5) and Yeast Replicating plasmids (the YRp and YEp series plasmids), Yeast Centromere plasmids (the YCp series plasmids), Yeast Artificial Chromosomes (YACs) which are based on yeast linear plasmids, denoted YLp, pGPD-2, 21 plasmids and derivatives thereof, and improved shuttle vectors such as those described in Gietz et al., Gene, 74: 527-34 (1988) (YIplac, YEplac and YCplac). Selectable markers in yeast vectors include a variety of auxotrophic markers, the most common of which are (in Saccharomyces cerevisiae) URA3, HIS3, LEU2, TRP1 and LYS2, which complement specific auxotrophic mutations, such as ura3-52, his3-D1, leu2-D1, trp1-D1 and lys2-201.

[0186] Insect cells may be chosen for high efficiency protein expression. Where the host cells are from Spodoptera frugiperda, e.g., Sf9 and Sf21 cell lines, and expresSF™ cells (Protein Sciences Corp., Meriden, Conn., USA), the vector replicative strategy is typically based upon the baculovirus life cycle. Typically, baculovirus transfer vectors are used to replace the wild-type AcMNPV polyhedrin gene with a heterologous gene of interest. Sequences that flank the polyhedrin gene in the wild-type genome are positioned 5′ and 3′ of the expression cassette on the transfer vectors. Following co-transfection with AcMNPV DNA, a homologous recombination event occurs between these sequences resulting in a recombinant virus carrying the gene of interest and the polyhedrin or p10 promoter. Selection can be based upon visual screening for lacZ fusion activity.

[0187] The host cells may also be mammalian cells, which are particularly useful for expression of proteins intended as pharmaceutical agents, and for screening of potential agonists and antagonists of a protein or a physiological pathway. Mammalian vectors intended for autonomous extrachromosomal replication will typically include a viral origin, such as the SV40 origin (for replication in cell lines expressing the large T-antigen, such as COS1 and COS7 cells), the papillomavirus origin, or the EBV origin for long term episomal replication (for use, e.g., in 293-EBNA cells, which constitutively express the EBV EBNA-1 gene product and adenovirus E1A). Vectors intended for integration, and thus replication as part of the mammalian chromosome, can, but need not, include an origin of replication functional in mammalian cells, such as the SV40 origin. Vectors based upon viruses, such as adenovirus, adeno-associated virus, vaccinia virus, and various mammalian retroviruses, will typically replicate according to the viral replicative strategy. Selectable markers for use in mammalian cells include, but are not limited to, resistance to neomycin (G418), blasticidin, hygromycin and zeocin, and selection based upon the purine salvage pathway using HAT medium.

[0188] Expression in mammalian cells can be achieved using a variety of plasmids, including pSV2, pBC12BI, and p91023, as well as lyric virus vectors (e.g., vaccinia virus, adeno virus, and baculovirus), episomal virus vectors (e.g., bovine papillomavirus), and retroviral vectors (e.g., murine retroviruses). Useful vectors for insect cells include baculoviral vectors and pVL 941.

[0189] Plant cells can also be used for expression, with the vector replicon typically derived from a plant virus (e.g., cauliflower mosaic virus, CaMV; tobacco mosaic virus, TMV) and selectable markers chosen for suitability in plants.

[0190] It is known that codon usage of different host cells may be different. For example, a plant cell and a human cell may exhibit a difference in codon preference for encoding a particular amino acid. As a result, human mRNA may not be efficiently translated in a plant, bacteria or insect host cell. Therefore, another embodiment of this invention is directed to codon optimization. The codons of the nucleic acid molecules of the invention may be modified to resemble, as much as possible, genes naturally contained within the host cell without altering the amino acid sequence encoded by the nucleic acid molecule.

[0191] Any of a wide variety of expression control sequences may be used in these vectors to express the nucleic acid molecules of this invention. Such useful expression control sequences include the expression control sequences associated with structural genes of the foregoing expression vectors. Expression control sequences that control transcription include, e.g., promoters, enhancers and transcription termination sites. Expression control sequences in eukaryotic cells that control post-transcriptional events include splice donor and acceptor sites and sequences that modify the half-life of the transcribed RNA, e.g., sequences that direct poly(A) addition or binding sites for RNA-binding proteins. Expression control sequences that control translation include ribosome binding sites, sequences which direct targeted expression of the polypeptide to or within particular cellular compartments, and sequences in the 5′ and 3′ untranslated regions that modify the rate or efficiency of translation.

[0192] Examples of useful expression control sequences for a prokaryote, e.g., E. coli, will include a promoter, often a phage promoter, such as phage lambda pL promoter, the trc promoter, a hybrid derived from the trp and lac promoters, the bacteriophage T7 promoter (in E. coli cells engineered to express the T7 polymerase), the \acute{TAC} or \acute{TRC} system, the major operator and promoter regions of phage lambda, the control regions of fd coat protein, and the araBAD operon. Prokaryotic expression vectors may further include transcription terminators, such as the aspA terminator, and elements that facilitate translation, such as a consensus ribosome binding site and translation termination codon, Schomer et al., Proc. Natl. Acad. Sci. USA 83: 8506-8510 (1986).

[0193] Expression control sequences for yeast cells, typically S. cerevisiae, will include a yeast promoter, such as the CYC1 promoter, the GAL1 promoter, the GAL10 promoter, ADH1 promoter, the promoters of the yeast α-mating system, or the GPD promoter, and will typically have elements that facilitate transcription termination, such as the transcription termination signals from the CYC1 or ADH1 gene.

[0194] Expression vectors useful for expressing proteins in mammalian cells will include a promoter active in mammalian cells. These promoters include, but are not limited to, those derived from mammalian viruses, such as the enhancer-promoter sequences from the immediate early gene of the human cytomegalovirus (CMV), the enhancer-promoter sequences from the Rous sarcoma virus long terminal repeat (RSV LTR), the enhancer-promoter from SV40 and the early and late promoters of adenovirus. Other expression control sequences include the promoter for 3-phosphoglycerate kinase or other glycolytic enzymes, the promoters of acid phosphatase. Other expression control sequences include those from the gene comprising the CSNA of interest. Often, expression is enhanced by incorporation of polyadenylation sites, such as the late SV40 polyadenylation site and the polyadenylation signal and transcription termination sequences from the bovine growth hormone (BGH) gene, and ribosome binding sites. Furthermore, vectors can include introns, such as intron II of rabbit β-globin gene and the SV40 splice elements.

[0195] Preferred nucleic acid vectors also include a selectable or amplifiable marker gene and means for amplifying the copy number of the gene of interest. Such marker genes are well known in the art. Nucleic acid vectors may also comprise stabilizing sequences (e.g., ori- or ARS-like sequences and telomere-like sequences), or may alternatively be designed to favor directed or non-directed integration into the host cell genome. In a preferred embodiment, nucleic acid sequences of this invention are inserted in frame into an expression vector that allows a high level expression of an RNA which encodes a protein comprising the encoded nucleic acid sequence of interest. Nucleic acid cloning and sequencing methods are well known to those of skill in the art and are described in an assortment of laboratory manuals, including Sambrook (1989), supra, Sambrook (2000), supra; Ausubel (1992), supra; and Ausubel (1999), supra. Product information from manufacturers of biological, chemical and immunological reagents also provide useful information.

[0196] Expression vectors may be either constitutive or inducible. Inducible vectors include either naturally inducible promoters, such as the trc promoter, which is regulated by the lac operon, and the pL promoter, which is regulated by tryptophan, the MMTV-LTR promoter, which is inducible by dexamethasone, or can contain synthetic promoters and/or additional elements that confer inducible control on adjacent promoters. Examples of inducible synthetic promoters are the hybrid Plac/ara-1 promoter and the PLtetO-1 promoter. The PLtetO-1 promoter takes advantage of the high expression levels from the PL promoter of phage lambda, but replaces the lambda repressor sites with two copies of operator 2 of the Tn10 tetracycline resistance operon, causing this promoter to be tightly repressed by the Tet repressor protein and induced in response to tetracycline (Tc) and Tc derivatives such as anhydrotetracycline. Vectors may also be inducible because they contain hormone response elements, such as the glucocorticoid response element (GRE) and the estrogen response element (ERE), which can confer hormone inducibility where vectors are used for expression in cells having the respective hormone receptors. To reduce background levels of expression, elements responsive to ecdysone, an insect hormone, can be used instead, with coexpression of the ecdysone receptor.

[0197] In one embodiment of the invention, expression vectors can be designed to fuse the expressed polypeptide to small protein tags that facilitate purification and/or visualization. Such tags include a polyhistidine tag that facilitates purification of the fusion protein by immobilized metal affinity chromatography, for example using NiNTA resin (Qiagen Inc., Valencia, Calif., USA) or TALON™ resin (cobalt immobilized affinity chromatography medium, Clontech Labs, Palo Alto, Calif., USA). The fusion protein can include a chitin-binding tag and self-excising intein, permitting chitin-based purification with self-removal of the fused tag (IMPACT™ system, New England Biolabs, Inc., Beverley, Mass. USA). Alternatively, the fusion protein can include a calmodulin-binding peptide tag, permitting purification by calmodulin affinity resin (Stratagene, La Jolla, Calif., USA), or a specifically excisable fragment of the biotin carboxylase carrier protein, permitting purification of in vivo biotinylated protein using an avidin resin and subsequent tag removal (Promega, Madison, Wis., USA). As another useful alternative, the polypeptides of the present invention can be expressed as a fusion to glutathione-S-transferase, the affinity and specificity of binding to glutathione permitting purification using glutathione affinity resins, such as Glutathione-Superflow Resin (Clontech Laboratories, Palo Alto, Calif., USA), with subsequent elution with free glutathione. Other tags include, for example, the Xpress epitope, detectable by anti-Xpress antibody (Invitrogen, Carlsbad, Calif., USA), a myc tag, detectable by anti-myc tag antibody, the V5 epitope, detectable by anti-V5 antibody (Invitrogen, Carlsbad, Calif., USA), FLAG® epitope, detectable by anti-FLAG® antibody (Stratagene, La Jolla, Calif., USA), and the HA epitope, detectable by anti-HA antibody.

[0198] For secretion of expressed polypeptides, vectors can include appropriate sequences that encode secretion signals, such as leader peptides. For example, the pSecTag2 vectors (Invitrogen, Carlsbad, Calif., USA) are 5.2 kb mammalian expression vectors that carry the secretion signal from the V-J2-C region of the mouse Ig kappa-chain for efficient secretion of recombinant proteins from a variety of mammalian cell lines.

[0199] Expression vectors can also be designed to fuse proteins encoded by the heterologous nucleic acid insert to polypeptides that are larger than purification and/or identification tags. Useful protein fusions include those that permit display of the encoded protein on the surface of a phage or cell, fusions to intrinsically fluorescent proteins, such as those that have a green fluorescent protein (GFP)-like chromophore, fusions to the IgG Fc region, and fusions for use in two hybrid systems.

[0200] Vectors for phage display fuse the encoded polypeptide to, e.g., the gene III protein (pIII) or gene VIII protein (pIII) for display on the surface of filamentous phage, such as M13. See Barbas et al., Phage Display: A Laboratory Manual, Cold Spring Harbor Laboratory Press (2001); Kay et al. (eds.), Phage Displav of Peptides and Proteins: A Laboratory Manual, Academic Press, Inc., (1996); Abelson et al. (eds.), Combinatorial Chemistry, (Methods in Enzymology, Vol. 267) Academic Press (1996). Vectors for yeast display, e.g. the pYD1 yeast display vector (Invitrogen, Carlsbad, Calif., USA), use the α-agglutinin yeast adhesion receptor to display recombinant protein on the surface of S. cerevisiae. Vectors for mammalian display, e.g., the pDisplay™ vector (Invitrogen, Carlsbad, Calif., USA), target recombinant proteins using an N-terminal cell surface targeting signal and a C-terminal transmembrane anchoring domain of platelet derived growth factor receptor.

[0201] A wide variety of vectors now exist that fuse proteins encoded by heterologous nucleic acids to the chromophore of the substrate-independent, intrinsically fluorescent green fluorescent protein from Aequorea victoria (“GFP”) and its variants. The GFP-like chromophore can be selected from GFP-like chromophores found in naturally occurring proteins, such as A. victoria GFP (GenBank accession number AAA27721), Renilla reniformis GFP, FP583 (GenBank accession no. AF168419) (DsRed), FP593 (AF272711), FP483 (AF168420), FP484 (AF168424), FP595 (AF246709), FP486 (AF168421), FP538 (AF168423), and FP506 (AF168422), and need include only so much of the native protein as is needed to retain the chromophore's intrinsic fluorescence. Methods for determining the minimal domain required for fluorescence are known in the art. See Li et al., J. Biol. Chem. 272: 28545-28549 (1997). Alternatively, the GFP-like chromophore can be selected from GFP-like chromophores modified from those found in nature. The methods for engineering such modified GFP-like chromophores and testing them for fluorescence activity, both alone and as part of protein fusions, are well known in the art. See Heim et al., Curr. Biol. 6: 178-182 (1996) and Palm et al., Methods Enzymol. 302: 378-394 (1999). A variety of such modified chromophores are now commercially available and can readily be used in the fusion proteins of the present invention. These include EGFP (“enhanced GFP”), EBFP (“enhanced blue fluorescent protein”), BFP2, EYTP (“enhanced yellow fluorescent protein”), ECFP (“enhanced cyan fluorescent protein”) or Citrine. EGFP (see, e.g, Cormack et al., Gene 173: 33-38 (1996); U.S. Pat. Nos. 6,090,919 and 5,804,387, the disclosures of which are incorporated herein by reference in their entireties) is found on a variety of vectors, both plasmid and viral, which are available commercially (Clontech Labs, Palo Alto, Calif., USA); EBFP is optimized for expression in mammalian cells whereas BFP2, which retains the original jellyfish codons, can be expressed in bacteria (see, e.g, Heim et al., Curr. Biol. 6: 178-182 (1996) and Cormack et al., Gene 173: 33-38 (1996)). Vectors containing these blue-shifted variants are available from Clontech Labs (Palo Alto, Calif., USA). Vectors containing EYFP, ECFP (see, e.g., Heim et al., Curr. Biol. 6: 178-182 (1996); Miyawaki et al., Nature 388: 882-887 (1997)) and Citrine (see, e.g., Heikal et al., Proc. Natl. Acad. Sci. USA 97: 11996-12001 (2000)) are also available from Clontech Labs. The GFP-like chromophore can also be drawn from other modified GFPs, including those described in U.S. Pat. Nos. 6,124,128; 6,096,865; 6,090,919; 6,066,476; 6,054,321; 6,027,881; 5,968,750; 5,874,304; 5,804,387; 5,777,079; 5,741,668; and 5,625,048, the disclosures of which are incorporated herein by reference in their entireties. See also Conn (ed.), Green Fluorescent Protein (Methods in Enzymology, Vol. 302), Academic Press, Inc. (1999); Yang, et al., J Biol Chem, 273: 8212-6 (1998); Bevis et al., Nature Biotechnology, 20:83-7 (2002). The GFP-like chromophore of each of these GFP variants can usefully be included in the fusion proteins of the present invention.

[0202] Fusions to the IgG Fc region increase serum half-life of protein pharmaceutical products through interaction with the FcRn receptor (also denominated the FcRp receptor and the Brambell receptor, FcRb), further described in International Patent Application Nos. WO 97/43316, WO 97/34631, WO 96/32478, and WO 96/18412, the disclosures of which are incorporated herein by reference in their entireties.

[0203] For long-term, high-yield recombinant production of the polypeptides of the present invention, stable expression is preferred. Stable expression is readily achieved by integration into the host cell genome of vectors having selectable markers, followed by selection of these integrants. Vectors such as pUB6/V5-His A, B, and C (Invitrogen, Carlsbad, Calif., USA) are designed for high-level stable expression of heterologous proteins in a wide range of mammalian tissue types and cell lines. pUB6/V5-His uses the promoter/enhancer sequence from the human ubiquitin C gene to drive expression of recombinant proteins: expression levels in 293, CHO, and NIH3T3 cells are comparable to levels from the CMV and human EF-1α promoters. The bsd gene permits rapid selection of stably transfected mammalian cells with the potent antibiotic blasticidin.

[0204] Replication incompetent retroviral vectors, typically derived from Moloney murine leukemia virus, also are useful for creating stable transfectants having integrated provirus. The highly efficient transduction machinery of retroviruses, coupled with the availability of a variety of packaging cell lines such as RetroPack™ PT 67, EcoPack2™-93, AmphoPack-293, and GP2-293 cell lines (all available from Clontech Laboratories, Palo Alto, Calif., USA) allow a wide host range to be infected with high efficiency; varying the multiplicity of infection readily adjusts the copy number of the integrated provirus.

[0205] Of course, not all vectors and expression control sequences will function equally well to express the nucleic acid molecules of this invention. Neither will all hosts function equally well with the same expression system. However, one of skill in the art may make a selection among these vectors, expression control sequences and hosts without undue experimentation and without departing from the scope of this invention. For example, in selecting a vector, the host must be considered because the vector must be replicated in it. The vector's copy number, the ability to control that copy number, the ability to control integration, if any, and the expression of any other proteins encoded by the vector, such as an antibiotic or other selection marker, should also be considered. The present invention further includes host cells comprising the vectors of the present invention, either present episomally within the cell or integrated, in whole or in part, into the host cell chromosome. Among other considerations, some of which are described above, a host cell strain may be chosen for its ability to process the expressed polypeptide in the desired fashion. Such post-translational modifications of the polypeptide include, but are not limited to, acetylation, carboxylation, glycosylation, phosphorylation, lipidation, and acylation, and it is an aspect of the present invention to provide CSPs with such post-translational modifications.

[0206] In selecting an expression control sequence, a variety of factors should also be considered. These include, for example, the relative strength of the sequence, its controllability, and its compatibility with the nucleic acid molecules of this invention, particularly with regard to potential secondary structures. Unicellular hosts should be selected by consideration of their compatibility with the chosen vector, the toxicity of the product coded for by the nucleic acid sequences of this invention, their secretion characteristics, their ability to fold the polypeptide correctly, their fermentation or culture requirements, and the ease of purification from them of the products coded for by the nucleic acid molecules of this invention.

[0207] The recombinant nucleic acid molecules and more particularly, the expression vectors of this invention may be used to express the polypeptides of this invention as recombinant polypeptides in a heterologous host cell. The polypeptides of this invention may be full-length or less than full-length polypeptide fragments recombinantly expressed from the nucleic acid molecules according to this invention. Such polypeptides include analogs, derivatives and muteins that may or may not have biological activity. Vectors of the present invention will also often include elements that permit in vitro transcription of RNA from the inserted heterologous nucleic acid. Such vectors typically include a phage promoter, such as that from T7, T3, or SP6, flanking the nucleic acid insert. Often two different such promoters flank the inserted nucleic acid, permitting separate in vitro production of both sense and antisense strands.

[0208] Transformation and other methods of introducing nucleic acids into a host cell (e.g., conjugation, protoplast transformation or fusion, transfection, electroporation, liposome delivery, membrane fusion techniques, high velocity DNA-coated pellets, viral infection and protoplast fusion) can be accomplished by a variety of methods which are well known in the art (See, for instance, Ausubel, supra, and Sambrook et al., supra). Bacterial, yeast, plant or mammalian cells are transformed or transfected with an expression vector, such as a plasmid, a cosmid, or the like, wherein the expression vector comprises the nucleic acid of interest. Alternatively, the cells may be infected by a viral expression vector comprising the nucleic acid of interest. Depending upon the host cell, vector, and method of transformation used, transient or stable expression of the polypeptide will be constitutive or inducible. One having ordinary skill in the art will be able to decide whether to express a polypeptide transiently or stably, and whether to express the protein constitutively or inducibly.

[0209] A wide variety of unicellular host cells are useful in expressing the DNA sequences of this invention. These hosts may include well known eukaryotic and prokaryotic hosts, such as strains of, fungi, yeast, insect cells such as Spodoptera frugiperda (SF9), animal cells such as CHO, as well as plant cells in tissue culture. Representative examples of appropriate host cells include, but are not limited to, bacterial cells, such as E. coli, Caulobacter crescentus, Streptomyces species, and Salmonella typhimurium; yeast cells, such as Saccharomyces cerevisiae, Schizosaccharomyces pombe, Pichia pastoris, Pichia methlanolica; insect cell lines, such as those from Spodoptera frugiperda, e.g., Sf9 and Sf21 cell lines, and expresSF™ cells (Protein Sciences Corp., Meriden, Conn., USA), Drosophila S2 cells, and Trichoplusia ni High Five® Cells (Invitrogen, Carlsbad, Calif., USA); and mammalian cells. Typical mammalian cells include BHK cells, BSC 1 cells, BSC 40 cells, BMT 10 cells, VERO cells, COS1 cells, COS7 cells, Chinese hamster ovary (CHO) cells, 3T3 cells, NIH 3T3 cells, 293 cells, HEPG2 cells, HeLa cells, L cells, MDCK cells, HEKC293 cells, WI38 cells, murine ES cell lines (e.g., from strains 129/SV, C57/BL6, DBA-1, 129/SVJ), K562 cells, Jurkat cells, and BW5147 cells. Other mammalian cell lines are well known and readily available from the American Type Culture Collection (ATCC) (Manassas, Va., USA) and the National Institute of General Medical Sciences (NIGMS) Human Genetic Cell Repository at the Coriell Cell Repositories (Camden, N.J., USA). Cells or cell lines derived from colon are particularly preferred because they may provide a more native post-translational processing. Particularly preferred are human colon cells.

[0210] Particular details of the transfection, expression and purification of recombinant proteins are well documented and are understood by those of skill in the art. Further details on the various technical aspects of each of the steps used in recombinant production of foreign genes in bacterial cell expression systems can be found in a number of texts and laboratory manuals in the art. See, e.g., Ausubel (1992), supra, Ausubel (1999), supra, Sambrook (1989), supra, and Sambrook (2001), supra.

[0211] Methods for introducing the vectors and nucleic acid molecules of the present invention into the host cells are well known in the art; the choice of technique will depend primarily upon the specific vector to be introduced and the host cell chosen.

[0212] Nucleic acid molecules and vectors may be introduced into prokaryotes, such as E. coli, in a number of ways. For instance, phage lambda vectors will typically be packaged using a packaging extract (e.g., Gigapack® packaging extract, Stratagene, La Jolla, Calif., USA), and the packaged virus used to infect E. coli.

[0213] Plasmid vectors will typically be introduced into chemically competent or electrocompetent bacterial cells. E. coli cells can be rendered chemically competent by treatment, e.g., with CaCl₂, or a solution of Mg²⁺, Mn²⁺, Ca²⁺, Rb⁺ or K⁺, dimethyl sulfoxide, dithiothreitol, and hexamine cobalt (III), Hanahan, J. Mol. Biol. 166(4):557-80 (1983), and vectors introduced by heat shock. A wide variety of chemically competent strains are also available commercially (e.g., Epicurian Coli® XL 10-Gold® Ultracompetent Cells (Stratagene, La Jolla, Calif., USA); DH5α competent cells (Clontech Laboratories, Palo Alto, Calif., USA); and TOP 10 Chemically Competent E. coli Kit (Invitrogen, Carlsbad, Calif., USA)). Bacterial cells can be rendered electrocompetent to take up exogenous DNA by electroporation by various pre-pulse treatments; vectors are introduced by electroporation followed by subsequent outgrowth in selected media. An extensive series of protocols is provided by BioRad (Richmond, Calif., USA).

[0214] Vectors can be introduced into yeast cells by spheroplasting, treatment with lithium salts, electroporation, or protoplast fusion. Spheroplasts are prepared by the action of hydrolytic enzymes such as a snail-gut extract, usually denoted Glusulase or Zymolyase, or an enzyme from Arthrobacter luteus to remove portions of the cell wall in the presence of osmotic stabilizers, typically 1 M sorbitol. DNA is added to the spheroplasts, and the mixture is co-precipitated with a solution of polyethylene glycol (PEG) and Ca²⁺. Subsequently, the cells are resuspended in a solution of sorbitol, mixed with molten agar and then layered on the surface of a selective plate containing sorbitol.

[0215] For lithium-mediated transformation, yeast cells are treated with lithium acetate to permeabilize the cell wall, DNA is added and the cells are co-precipitated with PEG. The cells are exposed to a brief heat shock, washed free of PEG and lithium acetate, and subsequently spread on plates containing ordinary selective medium. Increased frequencies of transformation are obtained by using specially-prepared single-stranded carrier DNA and certain organic solvents. Schiestl et al., Curr. Genet. 16(5-6): 339-46 (1989).

[0216] For electroporation, freshly-grown yeast cultures are typically washed, suspended in an osmotic protectant, such as sorbitol, mixed with DNA, and the cell suspension pulsed in an electroporation device. Subsequently, the cells are spread on the surface of plates containing selective media. Becker et al., Methods Enzymol. 194: 182-187 (1991). The efficiency of transformation by electroporation can be increased over 100-fold by using PEG, single-stranded carrier DNA and cells that are in late log-phase of growth. Larger constructs, such as YACS, can be introduced by protoplast fusion.

[0217] Mammalian and insect cells can be directly infected by packaged viral vectors, or transfected by chemical or electrical means. For chemical transfection, DNA can be coprecipitated with CaPO₄ or introduced using liposomal and nonliposomal lipid-based agents. Commercial kits are available for CaPO₄ transfection (CalPhos™ Mammalian Transfection Kit, Clontech Laboratories, Palo Alto, Calif., USA), and lipid-mediated transfection can be practiced using commercial reagents, such as LIPOFECTAMINE™ 2000, LIPOFECTAMINE™ Reagent, CELLFECTIN® Reagent, and LIPOFECTIN® Reagent (Invitrogen, Carlsbad. CA, USA), DOTAP Liposomal Transfection Reagent, FuGENE 6, X-tremeGENE Q2, DOSPER, (Roche Molecular Biochemicals, Indianapolis, Ind. USA), Effectene™, PolyFect®, Superfect® (Qiagen. Inc., Valencia, Calif., USA). Protocols for electroporating mammalian cells can be found in, for example, Norton et al. (eds.), Gene Transfer Methods: Introducing DNA into Living Cells and Organisms, BioTechniques Books, Eaton Publishing Co. (2000). Other transfection techniques include transfection by particle bombardment and microinjection. See, e.g., Cheng et al., Proc. Natl. Acad. Sci. USA 90(10): 4455-9 (1993); Yang et al., Proc. Natl. Acad. Sci. USA 87(24): 9568-72 (1990).

[0218] Production of the recombinantly produced proteins of the present invention can optionally be followed by purification.

[0219] Purification of recombinantly expressed proteins is now well within the skill in the art and thus need not be detailed here. See, e.g., Thorner et al. (eds.), Applications of Chimeric Genes and Hybrid Proteins, Part A: Gene Expression and Protein Purification (Methods in Enzymology, Vol. 326), Academic Press (2000); Harbin (ed.), Cloning, Gene Expression and Protein Purification: Experimental Procedures and Process Rationale, Oxford Univ. Press (2001); Marshak et al., Strategies for Protein Purification and Characterization: A Laboratory Course Manual, Cold Spring Harbor Laboratory Press (1996); and Roe (ed.), Protein Purification Applications, Oxford University Press (2001).

[0220] Briefly, however, if purification tags have been fused through use of an expression vector that appends such tags, purification can be effected, at least in part, by means appropriate to the tag, such as use of immobilized metal affinity chromatography for polyhistidine tags. Other techniques common in the art include ammonium sulfate fractionation, immunoprecipitation, fast protein liquid chromatography (FPLC), high performance liquid chromatography (HPLC), and preparative gel electrophoresis.

Polypeptides, Including Fragments Muteins, Homologous Proteins, Allelic Variants, Analogs and Derivatives

[0221] Another aspect of the invention relates to polypeptides encoded by the nucleic acid molecules described herein. In a preferred embodiment, the polypeptide is a colon specific polypeptide (CSP). In an even more preferred embodiment, the polypeptide comprises an amino acid sequence of SEQ ID NO: 113-259 or is derived from a polypeptide having the amino acid sequence of SEQ ID NO: 113-259. A polypeptide as defined herein may be produced recombinantly, as discussed supra, may be isolated from a cell that naturally expresses the protein, or may be chemically synthesized following the teachings of the specification and using methods well known to those having ordinary skill in the art.

[0222] Polypeptides of the present invention may also comprise a part or fragment of a CSP. In a preferred embodiment, the fragment is derived from a polypeptide having an amino acid sequence selected from the group consisting of SEQ ID NO: 113-259. Polypeptides of the present invention comprising a part or fragment of an entire CSP may or may not be CSPs. For example, a full-length polypeptide may be colon-specific, while a fragment thereof may be found in other tissues as well as in colon. A polypeptide that is not a CSP, whether it is a fragment, analog, mutein, homologous protein or derivative, is nevertheless useful, especially for immunizing animals to prepare anti-CSP antibodies. In a preferred embodiment, the part or fragment is a CSP. Methods of determining whether a polypeptide of the present invention is a CSP are described infra.

[0223] Polypeptides of the present invention comprising fragments of at least 6 contiguous amino acids are also useful in mapping B cell and T cell epitopes of the reference protein. See, e.g., Geysen et al., Proc. Natl. Acad. Sci. USA 81: 3998-4002 (1984) and U.S. Pat. Nos. 4,708,871 and 5,595,915, the disclosures of which are incorporated herein by reference in their entireties. Because the fragment need not itself be immunogenic, part of an immunodominant epitope, nor even recognized by native antibody, to be useful in such epitope mapping, all fragments of at least 6 amino acids of a polypeptide of the present invention have utility in such a study.

[0224] Polypeptides of the present invention comprising fragments of at least 8 contiguous amino acids, often at least 15 contiguous amino acids, are useful as immunogens for raising antibodies that recognize polypeptides of the present invention. See, e.g., Lerner, Nature 299: 592-596 (1982); Shinnick et al., Annu. Rev. Microbiol. 37: 425-46 (1983); Sutcliffe et al., Science 219: 660-6 (1983). As further described in the above-cited references, virtually all 8-mers, conjugated to a carrier, such as a protein, prove immunogenic and are capable of eliciting antibody for the conjugated peptide; accordingly, all fragments of at least 8 amino acids of the polypeptides of the present invention have utility as immunogens.

[0225] Polypeptides comprising fragments of at least 8, 9, 10 or 12 contiguous amino acids are also useful as competitive inhibitors of binding of the entire polypeptide, or a portion thereof, to antibodies (as in epitope mapping), and to natural binding partners, such as subunits in a multimeric complex or to receptors or ligands of the subject protein; this competitive inhibition permits identification and separation of molecules that bind specifically to the polypeptide of interest. See U.S. Pat. Nos. 5,539,084 and 5,783,674, incorporated herein by reference in their entireties.

[0226] The polypeptide of the present invention thus preferably is at least 6 amino acids in length, typically at least 8, 9, 10 or 12 amino acids in length, and often at least 15 amino acids in length. Often, the polypeptide of the present invention is at least 20 amino acids in length, even 25 amino acids, 30 amino acids, 35 amino acids, or 50 amino acids or more in length. Of course, larger polypeptides having at least 75 amino acids, 100 amino acids, or even 150 amino acids are also useful, and at times preferred.

[0227] One having ordinary skill in the art can produce fragments by truncating the nucleic acid molecule, e.g., a CSNA, encoding the polypeptide and then expressing it recombinantly. Alternatively, one can produce a fragment by chemically synthesizing a portion of the full-length polypeptide. One may also produce a fragment by enzymatically cleaving either a recombinant polypeptide or an isolated naturally occurring polypeptide. Methods of producing polypeptide fragments are well known in the art. See, e.g., Sambrook (1989), supra; Sambrook (2001), supra; Ausubel (1992), supra; and Ausubel (1999), supra. In one embodiment, a polypeptide comprising only a fragment, preferably a fragment of a CSP, may be produced by chemical or enzymatic cleavage of a CSP polypeptide. In a preferred embodiment, a polypeptide fragment is produced by expressing a nucleic acid molecule of the present invention encoding a fragment, preferably of a CSP, in a host cell.

[0228] Polypeptides of the present invention are also inclusive of mutants, fusion proteins, homologous proteins and allelic variants.

[0229] A mutant protein, or mutein, may have the same or different properties compared to a naturally occurring polypeptide and comprises at least one amino acid insertion, duplication, deletion, rearrangement or substitution compared to the amino acid sequence of a native polypeptide. Small deletions and insertions can often be found that do not alter the function of a protein. Muteins may or may not be colon-specific. Preferably, the mutein is colon-specific. More preferably the mutein is a polypeptide that comprises at least one amino acid insertion, duplication, deletion, rearrangement or substitution compared to the amino acid sequence of SEQ ID NO: 113-259. Accordingly, in a preferred embodiment, the mutein is one that exhibits at least 50% sequence identity, more preferably at least 60% sequence identity, even more preferably at least 70%, yet more preferably at least 80% sequence identity to a CSP comprising an amino acid sequence of SEQ ID NO: 113-259. In a yet more preferred embodiment, the mutein exhibits at least 85%, more preferably 90%, even more preferably 95% or 96%, and yet more preferably at least 97%, 98%, 99% or 99.5% sequence identity to a CSP comprising an amino acid sequence of SEQ ID NO: 113-259.

[0230] A mutein may be produced by isolation from a naturally occurring mutant cell, tissue or organism. A mutein may be produced by isolation from a cell, tissue or organism that has been experimentally mutagenized. Alternatively, a mutein may be produced by chemical manipulation of a polypeptide, such as by altering the amino acid residue to another amino acid residue using synthetic or semi-synthetic chemical techniques. In a preferred embodiment, a mutein is produced from a host cell comprising a mutated nucleic acid molecule compared to the naturally occurring nucleic acid molecule. For instance, one may produce a mutein of a polypeptide by introducing one or more mutations into a nucleic acid molecule of the invention and then expressing it recombinantly. These mutations may be targeted, in which particular encoded amino acids are altered, or may be untargeted, in which random encoded amino acids within the polypeptide are altered. Muteins with random amino acid alterations can be screened for a particular biological activity or property, particularly whether the polypeptide is colon-specific, as described below. Multiple random mutations can be introduced into the gene by methods well known to the art, e.g., by error-prone PCR, shuffling, oligonucleotide-directed mutagenesis, assembly PCR, sexual PCR mutagenesis, in vivo mutagenesis, cassette mutagenesis, recursive ensemble mutagenesis, exponential ensemble mutagenesis and site-specific mutagenesis. Methods of producing muteins with targeted or random amino acid alterations are well known in the art. See, e.g., Sambrook (1989), supra; Sambrook (2001), supra; Ausubel (1992), supra; and Ausubel (1999), as well as U.S. Pat. No. 5,223,408, which is herein incorporated by reference in its entirety.

[0231] The invention also contemplates polypeptides that are homologous to a polypeptide of the invention. In a preferred embodiment, the polypeptide is homologous to a CSP. In an even more preferred embodiment, the polypeptide is homologous to a CSP selected from the group having an amino acid sequence of SEQ ID NO: 113-259. By homologous polypeptide it is meant one that exhibits significant sequence identity to a CSP, preferably a CSP having an amino acid sequence of SEQ ID NO: 113-259. By significant sequence identity it is meant that the homologous polypeptide exhibits at least 50% sequence identity, more preferably at least 60% sequence identity, even more preferably at least 70%, yet more preferably at least 80% sequence identity to a CSP comprising an amino acid sequence of SEQ ID NO: 113-259. More preferred are homologous polypeptides exhibiting at least 85%, more preferably 90%, even more preferably 95% or 96%, and yet more preferably at least 97% or 98% sequence identity to a CSP comprising an amino acid sequence of SEQ ID NO: 113-259. Most preferably, the homologous polypeptide exhibits at least 99%, more preferably 99.5%, even more preferably 99.6%, 99.7%, 99.8% or 99.9% sequence identity to a CSP comprising an amino acid sequence of SEQ ID NO: 113-259. In a preferred embodiment, the amino acid substitutions of the homologous polypeptide are conservative amino acid substitutions as discussed supra.

[0232] Homologous polypeptides of the present invention also comprise polypeptide encoded by a nucleic acid molecule that selectively hybridizes to a CSNA or an antisense sequence thereof. In this embodiment, it is preferred that the homologous polypeptide be encoded by a nucleic acid molecule that hybridizes to a CSNA under low stringency, moderate stringency or high stringency conditions, as defined herein. More preferred is a homologous polypeptide encoded by a nucleic acid sequence which hybridizes to a CSNA selected from the group consisting of SEQ ID NO: 1-112 or a homologous polypeptide encoded by a nucleic acid molecule that hybridizes to a nucleic acid molecule that encodes a CSP, preferably a CSP of SEQ ID NO: 113-259 under low stringency, moderate stringency or high stringency conditions, as defined herein.

[0233] Homologous polypeptides of the present invention may be naturally occurring and derived from another species, especially one derived from another primate, such as chimpanzee, gorilla, rhesus macaque, or baboon, wherein the homologous polypeptide comprises an amino acid sequence that exhibits significant sequence identity to that of SEQ ID NO: 113-259. The homologous polypeptide may also be a naturally occurring polypeptide from a human, when the CSP is a member of a family of polypeptides. The homologous polypeptide may also be a naturally occurring polypeptide derived from a non-primate, mammalian species, including without limitation, domesticated species, e.g. dog, cat, mouse, rat, rabbit, guinea pig, hamster, cow, horse, goat or pig. The homologous polypeptide may also be a naturally occurring polypeptide derived from a non-mammalian species, such as birds or reptiles. The naturally occurring homologous protein may be isolated directly from humans or other species. Alternatively, the nucleic acid molecule encoding the naturally occurring homologous polypeptide may be isolated and used to express the homologous polypeptide recombinantly. The homologous polypeptide may also be one that is experimentally produced by random mutation of a nucleic acid molecule and subsequent expression of the nucleic acid molecule. Alternatively, the homologous polypeptide may be one that is experimentally produced by directed mutation of one or more codons to alter the encoded amino acid of a CSP. In a preferred embodiment, the homologous polypeptide encodes a polypeptide that is a CSP.

[0234] Relatedness of proteins can also be characterized using a second functional test, such as the ability of a first protein competitively to inhibit the binding of a second protein to an antibody. It is, therefore, another aspect of the present invention to provide isolated polpeptides not only identical in sequence to those described with particularity herein, but also to provide isolated polypeptides (“cross-reactive proteins”) that competitively inhibit the binding of antibodies to all or to a portion of the isolated polypeptides of the present invention. Such competitive inhibition can readily be determined using immunoassays well known in the art.

[0235] As discussed above, single nucleotide polymorphisms (SNP) occur frequently in eukaryotic genomes, and the sequence determined from one individual of a species may differ from other allelic forms present within the population. Thus, polypeptides of the present invention are also inclusive of those encoded by an allelic variant of a nucleic acid molecule encoding a CSP. In this embodiment, it is preferred that the polypeptide be encoded by an allelic variant of a gene that encodes a polypeptide having the amino acid sequence selected from the group consisting of SEQ ID NO: 113-259. More preferred is that the polypeptide be encoded by an allelic variant of a gene that has the nucleic acid sequence selected from the group consisting of SEQ ID NO: 1-112.

[0236] Polypeptides of the present invention are also inclusive of derivative polypeptides encoded by a nucleic acid molecule according to the instant invention. In this embodiment, it is preferred that the polypeptide be a CSP. Also preferred are derivative polypeptides having an amino acid sequence selected from the group consisting of SEQ ID NO: 113-259 and which has been acetylated, carboxylated, phosphorylated, glycosylated, ubiquitinated or post-translationally modified in another manner. In another preferred embodiment, the derivative has been labeled with, e.g., radioactive isotopes such as ¹²⁵I, ³²P, ³⁵S, and ³H. In another preferred embodiment, the derivative has been labeled with fluorophores, chemiluminescent agents, enzymes, and antiligands that can serve as specific binding pair members for a labeled ligand.

[0237] Polypeptide modifications are well known to those of skill and have been described in great detail in the scientific literature. Several particularly common modifications, glycosylation, lipid attachment, sulfation, gamma-carboxylation of glutamic acid residues, hydroxylation and ADP-ribosylation, for instance, are described in most basic texts, such as, for instance Creighton, Protein Structure and Molecular Properties, 2nd ed., W. H. Freeman and Company (1993). Many detailed reviews are available on this subject, such as, for example, those provided by Wold, in Johnson (ed.), Posttranslational Covalent Modification of Proteins, pgs. 1-12, Academic Press (1983); Seifter et al., Meth. Enzymol. 182: 626-646 (1990) and Rattan et al., Ann. N.Y. Acad. Sci. 663: 48-62 (1992).

[0238] One may determine whether a polypeptide of the invention is likely to be post-translationally modified by analyzing the sequence of the polypeptide to determine if there are peptide motifs indicative of sites for post-translational modification. There are a number of computer programs that permit prediction of post-translational modifications. See, e.g., expasy.org (accessed Nov. 11, 2002) of the world wide web, which includes PSORT, for prediction of protein sorting signals and localization sites, SignaIP, for prediction of signal peptide cleavage sites, MITOPROT and Predotar, for prediction of mitochondrial targeting sequences, NetOGlyc, for prediction of type O-glycosylation sites in mammalian proteins, big-PI Predictor and DGPI, for prediction of prenylation-anchor and cleavage sites, and NetPhos, for prediction of Ser, Thr and Tyr phosphorylation sites in eukaryotic proteins. Other computer programs, such as those included in GCG, also may be used to determine post-translational modification peptide motifs.

[0239] General examples of types of post-translational modifications include, but are not limited to: (Z)-dehydrobutyrine; 1-chondroitin sulfate-L-aspartic acid ester; 1′-glycosyl-L-tryptophan; 1′-phospho-L-histidine; 1-thioglycine; 2′-(S-L-cysteinyl)-L-histidine; 2′-[3-carboxamido(trimethylammonio)propyl]-L-histidine; 2′-alpha-mannosyl-L-tryptophan; 2-methyl-L-glutamine; 2-oxobutanoic acid; 2-pyrrolidone carboxylic acid; 3′-(1′-L-histidyl)-L-tyrosine; 3′-(Salpha-FAD)-L-histidine; 3′-(S-L-cysteinyl)-L-tyrosine; 3′,3″,5′-triiodo-L-thyronine; 3′-4′-phospho-L-tyrosine; 3-hydroxy-L-proline; 3′-methyl-L-histidine; 3-methyl-L-lanthionine; 3′-phospho-L-histidine; 4′-(L-tryptophan)-L-tryptophyl quinone; 42 N-cysteinyl-glycosylphosphatidylinositolethanolamine; 43-(T-L-histidyl)-L-tyrosine; 4-hydroxy-L-arginine; 4-hydroxy-L-lysine; 4-hydroxy-L-proline; 5′-(N-6-L-lysine)-L-topaquinone; 5-hydroxy-L-lysine; 5-methyl-L-arginine; alpha-1-microglobulin-Ig alpha complex chromophore; bis-L-cysteinyl bis-L-histidino diiron disulfide; bis-L-cysteinyl-L-N3′-histidino-L-serinyl tetrairon’ tetrasulfide; chondroitin sulfate D-glucuronyl-D-galactosyl-D-galactosyl-D-xylosyl-L-serine; D-alanine; D-allo-isoleucine; D-asparagine; dehydroalanine; dehydrotyrosine; dermatan 4-sulfate D-glucuronyl-D-galactosyl-D-galactosyl-D-xylosyl-L-serine; D-glucuronyl-N-glycine; dipyrrolylmethanemethyl-L-cysteine; D-leucine; D-methionine; D-phenylalanine; D-serine; D-tryptophan; glycine amide; glycine oxazolecarboxylic acid; glycine thiazolecarboxylic acid; heme P450-bis-L-cysteine-L-tyrosine; heme-bis-L-cysteine; hemediol-L-aspartyl ester-L-glutamyl ester; hemediol-L-aspartyl ester-L-glutamyl ester-L-methionine sulfonium; heme-L-cysteine; heme-L-histidine; heparan sulfate D-glucuronyl-D-galactosyl-D-galactosyl-D-xylosyl-L-serine; heme P450-bis-L-cysteine-L-lysine; hexakis-L-cysteinyl hexairon hexasulfide; keratan sulfate D-glucuronyl-D-galactosyl-D-galactosyl-D-xylosyl-L-threonine; L oxoalanine-lactic acid; L phenyllactic acid; 1′-(Salpha-FAD)-L-histidine; L-2′.4′,5′-topaquinone; L-3′,4′-dihydroxyphenylalanine; L-3′.4′.5′-trihydroxyphenylalanine; L-4′-bromophenylalanine; L-6′-bromotryptophan; L-alanine amide; L-alanyl imidazolinone glycine; L-allysine; L-arginine amide; L-asparagine amide; L-aspartic 4-phosphoric anhydride; L-aspartic acid 1-amide; L-beta-methylthioaspartic acid; L-bromohistidine; L-citrulline; L-cysteine amide; L-cysteine glutathione disulfide; L-cysteine methyl disulfide; L-cysteine methyl ester; L-cysteine oxazolecarboxylic acid; L-cysteine oxazolinecarboxylic acid; L-cysteine persulfide; L-cysteine sulfenic acid; L-cysteine sulfinic acid; L-cysteine thiazolecarboxylic acid; L-cysteinyl homocitryl molybdenum-heptairon-nonasulfide; L-cysteinyl imidazolinone glycine; L-cysteinyl molybdopterin; L-cysteinyl molybdopterin guanine dinucleotide; L-cystine; L-erythro-beta-hydroxyasparagine; L-erythro-beta-hydroxyaspartic acid; L-gamma-carboxyglutamic acid; L-glutamic acid 1-amide; L-glutamic acid 5-methyl ester; L-glutamine amide; L-glutamyl 5-glycerylphosphorylethanolamine; L-histidine amide; L-isoglutamyl-polyglutamic acid; L-isoglutamyl-polyglycine; L-isoleucine amide; L-lanthionine; L-leucine amide; L-lysine amide; L-lysine thiazolecarboxylic acid; L-lysinoalanine; L-methionine amide; L-methionine sulfone; L-phenyalanine thiazolecarboxylic acid; L-phenylalanine amide; L-proline amide; L-selenocysteine; L-selenocysteinyl molybdopterin guanine dinucleotide; L-serine amide; L-serine thiazolecarboxylic acid; L-seryl imidazolinone glycine; L-T-bromophenylalanine; L-T-bromophenylalanine; L-threonine amide; L-thyroxine; L-tryptophan amide; L-tryptophyl quinone; L-tyrosine amide; L-valine amide; meso-lanthionine; N-(L-glutamyl)-L-tyrosine; N-(L-isoaspartyl)-glycine; N-(L-isoaspartyl)-L-cysteine; N,N,N-trimethyl-L-alanine; N,N-dimethyl-L-proline; N2-acetyl-L-lysine; N2-succinyl-L-tryptophan; N4-(ADP-ribosyl)-L-asparagine; N4-glycosyl-L-asparagine; N4-hydroxymethyl-L-asparagine; N4-methyl-L-asparagine; N5-methyl-L-glutamine; N6-1-carboxyethyl-L-lysine; N6-(4-amino hydroxybutyl)-L-lysine; N6-(L-isoglutamyl)-L-lysine; N6-(phospho-5′-adenosine)-L-lysine; N6-(phospho-5′-guanosine)-L-tysine; N6,N6,N6-trimethyl-L-lysine; N6,N6-dimethyl-L-lysine; N6-acetyl-L-lysine; N6-biotinyl-L-lysine; N6-carboxy-L-lysine; N6-formyl-L-lysine; N6-glycyl-L-lysine; N6-lipoyl-L-lysine; N6-methyl-L-lysine; N6-methyl-N-6-poly(N-methyl-propylamine)-L-lysine; N6-mureinyl-L-lysine; N6-myristoyl-L-lysine; N6-palmitoyl-L-lysine; N6-pyridoxal phosphate-L-lysine; N6-pyruvic acid 2-iminyl-L-lysine; N6-retinal-L-lysine; N-acetylglycine; N-acetyl-L-glutamine; N-acetyl-L-alanine; N-acetyl-L-aspartic acid; N-acetyl-L-cysteine; N-acetyl-L-glutamic acid; N-acetyl-L-isoleucine; N-acetyl-L-methionine; N-acetyl-L-proline; N-acetyl-L-serine; N-acetyl-L-threonine; N-acetyl-L-tyrosine; N-acetyl-L-valine; N-alanyl-glycosylphosphatidylinositolethanolamine; N-asparaginyl-glycosylphosphatidylinositolethanolamine; N-aspartyl-glycosylphosphatidylinositolethanolamine; N-formylglycine; N-formyl-L-methionine; N-glycyl-glycosylphosphatidylinositolethanolamine; N-L-glutamyl-poly-L-glutamic acid; N-methylglycine; N-methyl-L-alanine; N-methyl-L-methionine; N-methyl-L-phenylalanine; N-myristoyl-glycine; N-palmitoyl-L-cysteine; N-pyruvic acid 2-iminyl-L-cysteine; N-pyruvic acid 2-iminyl-L-valine; N-seryl-glycosylphosphatidylinositolethanolamine; N-seryl-glycosyCSPhingolipidinositolethanolamine; O-(ADP-ribosyl)-L-serine; O-(phospho-5′-adenosine)-L-threonine; O-(phospho-5′-DNA)-L-serine; O-(phospho-5′-DNA)-L-threonine; O-(phospho-5′rRNA)-L-serine; O-(phosphoribosyl dephospho-coenzyme A)-L-serine; O-(sn-1-glycerophosphoryl)-L-serine; O4′-(Salpha-FAD)-L-tyrosine; O4′-(phospho-5′-adenosine)-L-tyrosine; O4′-(phospho-5′-DNA)-L-tyrosine; O4′-(phospho-5′-RNA)-L-tyrosine; O4′-(phospho-5′-uridine)-L-tyrosine; O4-glycosyl-L-hydroxyproline; O4′-glycosyl-L-tyrosine; O4′-sulfo-L-tyrosine; O5-glycosyl-L-hydroxylysine; O-glycosyl-L-serine; O-glycosyl-L-threonine; omega-N-(ADP-ribosyl)-L-arginine; omega-N-omega-N′-dimethyl-L-arginine; omega-N-methyl-L-arginine; omega-N-omega-N-dimethyl-L-arginine; omega-N-phospho-L-arginine; O'octanoyl-L-serine; O-palmitoyl-L-serine; O-palmitoyl-L-threonine; O-phospho-L-serine; O-phospho-L-threonine; O-phosphopantetheine-L-serine; phycoerythrobilin-bis-L-cysteine; phycourobilin-bis-L-cysteine; pyrroloquinoline quinone; pyruvic acid; S hydroxycinnamyl-L-cysteine; S-(2-aminovinyl)methyl-D-eysteine; S-(2-aminovinyl)-D-cysteine; S-(6-FW-L-cysteine; S-(Salpha-FAD)-L-cysteine; S-(ADP-ribosyl)-L-cysteine; S-(L-isoglutamyl)-L-cysteine; S-12-hydroxyfarnesyl-L-cysteine; S-acetyl-L-cysteine; S-diacylglycerol-L-cysteine; S-diphytanylglycerot diether-L-cysteine; S-farnesyl-L-cysteine; S-geranylgeranyl-L-cysteine; S-glycosyl-L-cysteine; S-glycyl-L-cysteine; S-methyl-L-cysteine; S-nitrosyl-L-cysteine; S-palmitoyl-L-cysteine; S-phospho-L-cysteine; S-phycobiliviolin-L-cysteine; S-phycocyanobilin-L-cysteine; S-phycoerythrobilin-L-cysteine; S-phytochromobilin-L-cysteine; S-selenyl-L-cysteine; S-sulfo-L-cysteine; tetrakis-L-cysteinyl diiron disulfide; tetrakis-L-cysteinyl iron; tetrakis-L-cysteinyl tetrairon tetrasulfide; trans-2,3-cis 4-dihydroxy-L-proline; tris-L-cysteinyl triiron tetrasulfide; tris-L-cysteinyl triiron trisulfide; tris-L-cysteinyl-L-aspartato tetrairon tetrasulfide; tris-L-cysteinyl-L-cysteine persulfido-bis-L-glutamato-L-histidino tetrairon disulfide trioxide; tris-L-cysteinyl-L-N3′-histidino tetrairon tetrasulfide; tris-L-cysteinyl-L-N1′-histidino tetrairon tetrasulfide; and tris-L-cysteinyl-L-serinyl tetrairon tetrasulfide.

[0240] Additional examples of PTMs may be found in web sites such as the Delta Mass database based on Krishna, R. G. and F. Wold (1998). Posttranslational Modifications. Proteins—Analysis and Design. R. H. Angeletti. San Diego, Academic Press. 1: 121-206; Methods in Enzymology, 193, J. A. McClosky (ed) (1990), pages 647-660; Methods in Protein Sequence Analysis edited by Kazutomo Imahori and Fumio Sakiyama, Plenum Press, (1993) “Post-translational modifications of proteins” R. G. Krishna and F. Wold pages 167-172; “GlycoSuiteDB: a new curated relational database of glycoprotein glycan structures and their biological sources” Cooper et al. Nucleic Acids Res. 29; 332-335 (2001) “O-GLYCBASE version 4.0: a revised database of O-glycosylated proteins” Gupta et al. Nucleic Acids Research, 27: 370-372 (1999); and “PhosphoBase, a database of phosphorylation sites: release 2.0.”, Kreegipuu et al. Nucleic Acids Res 27(1):237-239 (1999) see also, WO 02/21139A2, the disclosure of which is incorporated herein by reference in its entirety.

[0241] Tumorigenesis is often accompanied by alterations in the post-translational modifications of proteins. Thus, in another embodiment, the invention provides polypeptides from cancerous cells or tissues that have altered post-translational modifications compared to the post-translational modifications of polypeptides from normal cells or tissues. A number of altered post-translational modifications are known. One common alteration is a change in phosphorylation state, wherein the polypeptide from the cancerous cell or tissue is hyperphosphorylated or hypophosphorylated compared to the polypeptide from a normal tissue, or wherein the polypeptide is phosphorylated on different residues than the polypeptide from a normal cell. Another common alteration is a change in glycosylation state, wherein the polypeptide from the cancerous cell or tissue has more or less glycosylation than the polypeptide from a normal tissue, and/or wherein the polypeptide from the cancerous cell or tissue has a different type of glycosylation than the polypeptide from a noncancerous cell or tissue. Changes in glycosylation may be critical because carbohydrate-protein and carbohydrate-carbohydrate interactions are important in cancer cell progression, dissemination and invasion. See, e.g., Barchi, Curr. Pharm. Des. 6: 485-501 (2000), Verma, Cancer Biochem. Biophys. 14: 151-162 (1994) and Dennis et al., Bioessays 5: 412-421 (1999).

[0242] Another post-translational modification that may be altered in cancer cells is prenylation. Prenylation is the covalent attachment of a hydrophobic prenyl group (either farnesyl or geranylgeranyl) to a polypeptide. Prenylation is required for localizing a protein to a cell membrane and is often required for polypeptide function. For instance, the Ras superfamily of GTPase signalling proteins must be prenylated for function in a cell. See, e.g., Prendergast et al., Semin. Cancer Biol. 10: 443-452 (2000) and Khwaja et al., Lancet 355: 741-744 (2000).

[0243] Other post-translation modifications that may be altered in cancer cells include, without limitation, polypeptide methylation, acetylation, arginylation or racemization of amino acid residues. In these cases, the polypeptide from the cancerous cell may exhibit either increased or decreased amounts of the post-translational modification compared to the corresponding polypeptides from noncancerous cells.

[0244] Other polypeptide alterations in cancer cells include abnormal polypeptide cleavage of proteins and aberrant protein-protein interactions. Abnormal polypeptide cleavage may be cleavage of a polypeptide in a cancerous cell that does not usually occur in a normal cell, or a lack of cleavage in a cancerous cell, wherein the polypeptide is cleaved in a normal cell. Aberrant protein-protein interactions may be either covalent cross-linking or non-covalent binding between proteins that do not normally bind to each other. Alternatively, in a cancerous cell, a protein may fail to bind to another protein to which it is bound in a noncancerous cell. Alterations in cleavage or in protein-protein interactions may be due to over- or underproduction of a polypeptide in a cancerous cell compared to that in a normal cell, or may be due to alterations in post-translational modifications (see above) of one or more proteins in the cancerous cell. See, e.g., Henschen-Edman, Ann. N.Y. Acad. Sci. 936: 580-593 (2001).

[0245] Alterations in polypeptide post-translational modifications, as well as changes in polypeptide cleavage and protein-protein interactions, may be determined by any method known in the art. For instance, alterations in phosphorylation may be determined by using anti-phosphoserine, anti-phosphothreonine or anti-phosphotyrosine antibodies or by amino acid analysis. Glycosylation alterations may be determined using antibodies specific for different sugar residues, by carbohydrate sequencing, or by alterations in the size of the glycoprotein, which can be determined by, e.g., SDS polyacrylamide gel electrophoresis (PAGE). Other alterations of post-translational modifications, such as prenylation, racemization, methylation, acetylation and arginylation, may be determined by chemical analysis, protein sequencing, amino acid analysis, or by using antibodies specific for the particular post-translational modifications. Changes in protein-protein interactions and in polypeptide cleavage may be analyzed by any method known in the art including, without limitation, non-denaturing PAGE (for non-covalent protein-protein interactions), SDS PAGE (for covalent protein-protein interactions and protein cleavage), chemical cleavage, protein sequencing or immunoassays.

[0246] In another embodiment, the invention provides polypeptides that have been post-translationally modified. In one embodiment, polypeptides may be modified enzymatically or chemically, by addition or removal of a post-translational modification. For example, a polypeptide may be glycosylated or deglycosylated enzymatically. Similarly, polypeptides may be phosphorylated using a purified kinase, such as a MAP kinase (e.g, p38, ERK, or JNK) or a tyrosine kinase (e.g., Src or erbB2). A polypeptide may also be modified through synthetic chemistry. Alternatively, one may isolate the polypeptide of interest from a cell or tissue that expresses the polypeptide with the desired post-translational modification. In another embodiment, a nucleic acid molecule encoding the polypeptide of interest is introduced into a host cell that is capable of post-translationally modifying the encoded polypeptide in the desired fashion. If the polypeptide does not contain a motif for a desired post-translational modification, one may alter the post-translational modification by mutating the nucleic acid sequence of a nucleic acid molecule encoding the polypeptide so that it contains a site for the desired post-translational modification. Amino acid sequences that may be post-translationally modified are known in the art. See, e.g., the programs described above on the website expasy.org of the world wide web. The nucleic acid molecule may also be introduced into a host cell that is capable of post-translationally modifying the encoded polypeptide. Similarly, one may delete sites that are post-translationally modified by either mutating the nucleic acid sequence so that the encoded polypeptide does not contain the post-translational modification motif, or by introducing the native nucleic acid molecule into a host cell that is not capable of post-translationally modifying the encoded polypeptide.

[0247] It will be appreciated, as is well known and as noted above, that polypeptides are not always entirely linear. For instance, polypeptides may be branched as a result of ubiquitination, and they may be circular, with or without branching, generally as a result of posttranslation events, including natural processing events and events brought about by human manipulation which do not occur naturally. Circular, branched and branched circular polypeptides may be synthesized by non-translation natural processes and by entirely synthetic methods, as well. Modifications can occur any where in a polypeptide, including the peptide backbone, the amino acid side-chains and the amino or carboxyl termini. In fact, blockage of the amino or carboxyl group in a polypeptide, or both, by a covalent modification, is common in naturally occurring and synthetic polypeptides and such modifications may be present in polypeptides of the present invention, as well. For instance, the amino terminal residue of polypeptides made in E. coli, prior to proteolytic processing, almost invariably will be N-formylmethionine.

[0248] Useful post-synthetic (and post-translational) modifications include conjugation to detectable labels, such as fluorophores. A wide variety of amine-reactive and thiol-reactive fluorophore derivatives have been synthesized that react under nondenaturing conditions with N-terminal amino groups and epsilon amino groups of lysine residues, on the one hand, and with free thiol groups of cysteine residues, on the other.

[0249] Kits are available commercially that permit conjugation of proteins to a variety of amine-reactive or thiol-reactive fluorophores: Molecular Probes, Inc. (Eugene, Oreg., USA), e.g., offers kits for conjugating proteins to Alexa Fluor 350, Alexa Fluor 430, Fluorescein-EX, Alexa Fluor 488, Oregon Green 488, Alexa Fluor 532, Alexa Fluor 546, Alexa Fluor 546, Alexa Fluor 568, Alexa Fluor 594, and Texas Red-X.

[0250] A wide variety of other amine-reactive and thiol-reactive fluorophores are available commercially (Molecular Probes, Inc., Eugene, Oreg., USA), including Alexa Fluor® 350, Alexa Fluor® 488, Alexa Fluor® 532, Alexa Fluor® 546, Alexa Fluor® 568, Alexa Fluor® 594, Alexa Fluor® 647 (monoclonal antibody labeling kits available from Molecular Probes, Inc., Eugene, Oreg., USA), BODIPY dyes, such as BODIPY 493/503, BODIPY FL, BODIPY R6G, BODIPY 530/550, BODIPY TMR, BODIPY 558/568, BODIPY 558/568, BODIPY 5641/570, BODIPY 576/589, BODIPY 588/591, BODIPY TR, BODIPY 630/650, BODIPY 650/665, Cascade Blue, Cascade Yellow, Dansyl, lissamine rhodamine B, Marina Blue, Oregon Green 488, Oregon Green 514, Pacific Blue, rhodamine 6G, rhodamine green, rhodamine red, tetramethylrhodamine, Texas Red (available from Molecular Probes, Inc., Eugene, Oreg., USA).

[0251] The polypeptides of the present invention can also be conjugated to fluorophores, other proteins, and other macromolecules, using bifunctional linking reagents. Common homobifunctional reagents include, e.g., APG, AEDP, BASED, BMB, BMDB, BMH, BMOE, BM[PEO]3, BM[PEO]4, BS3, BSOCOES, DFDNB, DMA, DMP, DMS, DPDPB, DSG, DSP (Lomant's Reagent), DSS, DST, DTBP, DTME, DTSSP, EGS, HBVS, Sulfo-BSOCOES, Sulfo-DST, Sulfo-EGS (all available from Pierce, Rockford, Ill., USA); common heterobifunctional cross-linkers include ABH, AHMAS, ANB-NOS, APDP, ASBA, BMPA, BMPH, BMPS, EDC, EMCA, EMCH, EMCS, KMUA, KMUH, GMBS, LC-SMCC, LC-SPDP, MBS, M2C2H, MPBH, MSA, NHS-ASA, PDPH, PMPI, SADP, SAED, SAND, SANPAH, SASD, SATP, SBAP, SFAD, SIA, SIAB, SMCC, SMPB, SMPH, SMPT, SPDP, Sulfo-EMCS, Sulfo-GMBS, Sulfo-HSAB, Sulfo-KMUS, Sulfo-LC-SPDP, Sulfo-MBS, Sulfo-NHS-LC-ASA, Sulfo-SADP, Sulfo-SANPAH, Sulfo-SIAB, Sulfo-SMCC, Sulfo-SMPB, Sulfo-LC-SMPT, SVSB, TFCS (all available Pierce, Rockford, Ill., USA).

[0252] Polypeptides of the present invention, including full length polypeptides, fragments and fusion proteins, can be conjugated, using such cross-linking reagents, to fluorophores that are not amine- or thiol-reactive. Other labels that usefully can be conjugated to polypeptides of the present invention include radioactive labels, echosonographic contrast reagents, and NM contrast agents.

[0253] Polypeptides of the present invention, including full length polypeptides, fragments and fusion proteins, can also usefully be conjugated using cross-linking agents to carrier proteins, such as KLH, bovine thyroglobulin, and even bovine serum albumin (BSA), to increase immunogenicity for raising anti-CSP antibodies.

[0254] Polypeptides of the present invention, including full length polypeptides, fragments and fusion proteins, can also usefully be conjugated to polyethylene glycol (PEG); PEGylation increases the serum half life of proteins administered intravenously for replacement therapy. Delgado et al., Crit. Rev. Ther. Drug Carrier Syst. 9(3-4): 249-304 (1992); Scott et al., Curr. Pharm. Des. 4(6): 423-38 (1998); DeSantis et al., Curr. Opin. Biotechnol. 10(4): 324-30 (1999). PEG monomers can be attached to the protein directly or through a linker, with PEGylation using PEG monomers activated with tresyl chloride (2,2,2-trifluoroethanesulphonyl chloride) permitting direct attachment under mild conditions.

[0255] Polypeptides of the present invention are also inclusive of analogs of a polypeptide encoded by a nucleic acid molecule according to the instant invention. In a preferred embodiment, this polypeptide is a CSP. In a more preferred embodiment, this polypeptide is derived from a polypeptide having part or all of the amino acid sequence of SEQ ID NO: 113-259. Also preferred is an analog polypeptide comprising one or more substitutions of non-natural amino acids or non-native inter-residue bonds compared to the naturally occurring polypeptide. In one embodiment, the analog is structurally similar to a CSP, but one or more peptide linkages is replaced by a linkage selected from the group consisting of —CH₂NH—, —CH₂S—, —CH₂—CH₂—, —CH═CH-(cis and trans), —COCH₂—, —CH(OH)CH₂—and —CH₂SO—. In another embodiment, the analog comprises substitution of one or more amino acids of a CSP with a D-amino acid of the same type or other non-natural amino acid in order to generate more stable peptides. D-amino acids can readily be incorporated during chemical peptide synthesis: peptides assembled from D-amino acids are more resistant to proteolytic attack; incorporation of D-amino acids can also be used to confer specific three-dimensional conformations on the peptide. Other amino acid analogues commonly added during chemical synthesis include ornithine, norleucine, phosphorylated amino acids (typically phosphoserine, phosphothreonine, phosphotyrosine), L-malonyltyrosine, a non-hydrolyzable analog of phosphotyrosine (see, e.g., Kole et al., Biochem. Biophys. Res. Com. 209: 817-821 (1995)), and various halogenated phenylalanine derivatives.

[0256] Non-natural amino acids can be incorporated during solid phase chemical synthesis or by recombinant techniques, although the former is typically more common. Solid phase chemical synthesis of peptides is well established in the art. Procedures are described, inter alia, in Chan et al. (eds.), Fmoc Solid Phase Peptide Synthesis: A Practical Approach (Practical Approach Series), Oxford Univ. Press (March 2000); Jones, Amino Acid and Peptide Synthesis (Oxford Chemistry Primers, No 7), Oxford Univ. Press (1992); and Bodanszky, Principles of Peptide Synthesis (Springer Laboratory), Springer Verlag (1993).

[0257] Amino acid analogues having detectable labels are also usefully incorporated during synthesis to provide derivatives and analogs. Biotin, for example can be added using biotinoyl-(9-fluorenylmethoxycarbonyl)-L-lysine (FMOC biocytin) (Molecular Probes, Eugene, Oreg., USA). Biotin can also be added enzymatically by incorporation into a fusion protein of an E. coli BirA substrate peptide. The FMOC and tBOC derivatives of dabcyl-L-lysine (Molecular Probes, Inc., Eugene, Oreg., USA) can be used to incorporate the dabcyl chromophore at selected sites in the peptide sequence during synthesis. The aminonaphthalene derivative EDANS, the most common fluorophore for pairing with the dabcyl quencher in fluorescence resonance energy transfer (FRET) systems, can be introduced during automated synthesis of peptides by using EDANS-FMOC-L-glutamic acid or the corresponding tBOC derivative (both from Molecular Probes, Inc., Eugene, Oreg., USA). Tetramethylrhodamine fluorophores can be incorporated during automated FMOC synthesis of peptides using (FMOC)-TR-L-lysine (Molecular Probes, Inc. Eugene, Oreg., USA).

[0258] Other useful amino acid analogues that can be incorporated during chemical synthesis include aspartic acid, glutamic acid, lysine, and tyrosine analogues having allyl side-chain protection (Applied Biosystems, Inc., Foster City, Calif., USA); the allyl side chain permits synthesis of cyclic, branched-chain, sulfonated, glycosylated, and phosphorylated peptides.

[0259] A large number of other FMOC-protected non-natural amino acid analogues capable of incorporation during chemical synthesis are available commercially, including, e.g., Fmoc-2-aminobicyclo[2.2.1]heptane-2-carboxylic acid, Fmoc-3-endo-aminobicyclo[2.2.1]heptane-2-endo-carboxylic acid, Fmoc-3-exo-aminobicyclo[2.2.1]heptane-2-exo-carboxylic acid, Fmoc-3-endo-amino-bicyclo[2.2.1]hept-5-ene-2-endo-carboxylic acid, Fmoc-3-exo-amino-bicyclo[2.2.1]hept-5-ene-2-exo-carboxylic acid, Fmoc-cis-2-amino-1-cyclohexanecarboxylic acid, Fmoc-trans-2-amino-1-cyclohexanecarboxylic acid, Fmoc-1-amino-1-cyclopentanecarboxylic acid, Fmoc-cis-2-amino-1-cyclopentanecarboxylic acid, Fmoc-1-amino-1-cyclopropanecarboxylic acid, Fmoc-D-2-amino-4-(ethylthio)butyric acid, Fmoc-L-2-amino-4-(ethylthio)butyric acid, Fmoc-L-buthionine, Fmoc-S-methyl-L-Cysteine, Fmoc-2-aminobenzoic acid (anthranillic acid), Fmoc-3-aminobenzoic acid, Fmoc-4-aminobenzoic acid, Fmoc-2-aminobenzophenone-2′-carboxylic acid, Fmoc-N-(4-aminobenzoyl)-β-alanine, Fmoc-2-amino-4,5-dimethoxybenzoic acid, Fmoc-4-aminohippuric acid, Fmoc-2-amino-3-hydroxybenzoic acid, Fmoc-2-amino-5-hydroxybenzoic acid, Fmoc-3-amino-4-hydroxybenzoic acid, Fmoc-4-amino-3-hydroxybenzoic acid, Fmoc-4-amino-2-hydroxybenzoic acid, Fmoc-5-amino-2-hydroxybenzoic acid, Fmoc-2-amino-3-methoxybenzoic acid, Fmoc-4-amino-3-methoxybenzoic acid, Fmoc-2-amino-3-methylbenzoic acid, Fmoc-2-amino-5-methylbenzoic acid, Fmoc-2-amino-6-methylbenzoic acid, Fmoc-3-amino-2-methylbenzoic acid, Fmoc-3-amino-4-methylbenzoic acid, Fmoc-4-amino-3-methylbenzoic acid, Fmoc-3-amino-2-naphtoic acid, Fmoc-D,L-3-amino-3-phenylpropionic acid, Fmoc-L-Methyldopa, Fmoc-2-amino-4,6-dimethyl-3pyridinecarboxylic acid, Fmoc-D,L-amino-2-thiophenacetic acid, Fmoc-4-(carboxymethyl)piperazine, Fmoc-4-carboxypiperazine, Fmoc-4-(carboxymethyl)homopiperazine, Fmoc-4-phenyl-4-piperidinecarboxylic acid, Fmoc-L-1,2,3,4-tetrahydronorharman-3-carboxylic acid, Fmoc-L-thiazolidine-4-carboxylic acid, all available from The Peptide Laboratory (Richmond, Calif., USA).

[0260] Non-natural residues can also be added biosynthetically by engineering a suppressor tRNA, typically one that recognizes the UAG stop codon, by chemical aminoacylation with the desired unnatural amino acid. Conventional site-directed mutagenesis is used to introduce the chosen stop codon UAG at the site of interest in the protein gene. When the acylated suppressor tRNA and the mutant gene are combined in an in vitro transcription/translation system, the unnatural amino acid is incorporated in response to the UAG codon to give a protein containing that amino acid at the specified position. Liu et al., Proc. Natl Acad. Sci. USA 96(9): 4780-5 (1999); Wang et al., Science 292(5516): 498-500 (2001).

[0261] Fusion Proteins

[0262] Another aspect of the present invention relates to the fusion of a polypeptide of the present invention to heterologous polypeptides. In a preferred embodiment, the polypeptide of the present invention is a CSP. In a more preferred embodiment, the polypeptide of the present invention that is fused to a heterologous polypeptide which comprises part or all of the amino acid sequence of SEQ ID NO: 113-259, or is a mutein, homologous polypeptide, analog or derivative thereof. In an even more preferred embodiment, the fusion protein is encoded by a nucleic acid molecule comprising all or part of the nucleic acid sequence of SEQ ID NO: 1-112, or comprises all or part of a nucleic acid sequence that selectively hybridizes or is homologous to a nucleic acid molecule comprising a nucleic acid sequence of SEQ ID NO: 1-112.

[0263] The fusion proteins of the present invention will include at least one fragment of a polypeptide of the present invention, which fragment is at least 6, typically at least 8, often at least 15, and usefully at least 16, 17, 18, 19, or 20 amino acids long. The fragment of the polypeptide of the present to be included in the fusion can usefully be at least 25 amino acids long, at least 50 amino acids long, and can be at least 75, 100, or even 150 amino acids long. Fusions that include the entirety of a polypeptide of the present invention have particular utility.

[0264] The heterologous polypeptide included within the fusion protein of the present invention is at least 6 amino acids in length, often at least 8 amino acids in length, and preferably at least 15, 20, or 25 amino acids in length. Fusions that include larger polypeptides, such as the IgG Fc region, and even entire proteins (such as GFP chromophore-containing proteins) are particularly useful.

[0265] As described above in the description of vectors and expression vectors of the present invention, which discussion is incorporated here by reference in its entirety, heterologous polypeptides to be included in the fusion proteins of the present invention can usefully include those designed to facilitate purification and/or visualization of recombinantly-expressed proteins. See, e.g., Ausubel, Chapter 16, (1992), supra. Although purification tags can also be incorporated into fusions that are chemically synthesized, chemical synthesis typically provides sufficient purity that further purification by HPLC suffices; however, visualization tags as above described retain their utility even when the protein is produced by chemical synthesis, and when so included render the fusion proteins of the present invention useful as directly detectable markers of the presence of a polypeptide of the invention.

[0266] As also discussed above, heterologous polypeptides to be included in the fusion proteins of the present invention can usefully include those that facilitate secretion of recombinantly expressed proteins into the periplasmic space or extracellular milieu for prokaryotic hosts or into the culture medium for eukaryotic cells through incorporation of secretion signals and/or leader sequences. For example, a His⁶ tagged protein can be purified on a Ni affinity column and a GST fusion protein can be purified on a glutathione affinity column. Similarly, a fusion protein comprising the Fc domain of IgG can be purified on a Protein A or Protein G column and a fusion protein comprising an epitope tag such as myc can be purified using an immunoaffinity column containing an anti-c-myc antibody. It is preferable that the epitope tag be separated from the protein encoded by the essential gene by an enzymatic cleavage site that can be cleaved after purification. See also the discussion of nucleic acid molecules encoding fusion proteins that may be expressed on the surface of a cell.

[0267] Other useful fusion proteins of the present invention include those that permit use of the polypeptide of the present invention as bait in a yeast two-hybrid system. See Bartel et al. (eds.), The Yeast Two-Hybrid System, Oxford University Press (1997); Zhu et al., Yeast Hybrid Technologies, Eaton Publishing (2000); Fields et al., Trends Genet. 10(8): 286-92 (1994); Mendelsohn et al., Curr. Opin. Biotechnol. 5(5): 482-6 (1994); Luban et al., Curr. Opin. Biotechnol. 6(1): 59-64 (1995); Allen et al., Trends Biochem. Sci. 20(12): 511-6 (1995); Drees, Curr. Opin. Chem. Biol. 3(1): 64-70 (1999); Topcu et al., Pharm. Res. 17(9): 1049-55 (2000); Fashena et al., Gene 250(1-2): 1-14 (2000); Colas et al., Nature 380, 548-550 (1996); Norman, T. et al., Science 285, 591-595 (1999); Fabbrizio et al., Oncogene 18, 4357-4363 (1999); Xu et al., Proc Natl Acad Sci USA. 94, 12473-12478 (1997); Yang, et al., Nuc. Acids Res. 23, 1152-1156 (1995); Kolonin et al., Proc Natl Acad Sci USA 95, 14266-14271 (1998); Cohen et al., Proc Natl Acad Sci USA 95, 14272-14277 (1998); Uetz, et al. Nature 403, 623-627(2000); Ito, et al., Proc Natl Acad Sci USA 98, 4569-4574 (2001). Typically, such fusion is to either E. coli LexA or yeast GAL4 DNA binding domains. Related bait plasmids are available that express the bait fused to a nuclear localization signal.

[0268] Other useful fusion proteins include those that permit display of the encoded polypeptide on the surface of a phage or cell, fusions to intrinsically fluorescent proteins, such as green fluorescent protein (GFP), and fusions to the IgG Fc region, as described above.

[0269] The polypeptides of the present invention can also usefully be fused to protein toxins, such as Pseudomonas exotoxin A, diphtheria toxin, shiga toxin A, anthrax toxin lethal factor, or ricin, in order to effect ablation of cells that bind or take up the proteins of the present invention.

[0270] Fusion partners include, inter alia, myc, hemagglutinin (HA), GST, immunoglobulins, β-galactosidase, biotin trpE, protein A, β-lactamase, α-amylase, maltose binding protein, alcohol dehydrogenase, polyhistidine (for example, six histidine at the amino and/or carboxyl terminus of the polypeptide), lacZ, green fluorescent protein (GFP), yeast a mating factor, GAL4 transcription activation or DINA binding domain, luciferase, and serum proteins such as ovalbumin, albumin and the constant domain of IgG. See, e.g., Ausubel (1992), supra and Ausubel (1999), supra. Fusion proteins may also contain sites for specific enzymatic cleavage, such as a site that is recognized by enzymes such as Factor XIII, trypsin, pepsin, or any other enzyme known in the art. Fusion proteins will typically be made by either recombinant nucleic acid methods, as described above, chemically synthesized using techniques well known in the art (e.g., a Merrifield synthesis), or produced by chemical cross-linking.

[0271] Another advantage of fusion proteins is that the epitope tag can be used to bind the fusion protein to a plate or column through an affinity linkage for screening binding proteins or other molecules that bind to the CSP.

[0272] As further described below, the polypeptides of the present invention can readily be used as specific immunogens to raise antibodies that specifically recognize polypeptides of the present invention including CSPs and their allelic variants and homologues. The antibodies, in turn, can be used, inter alia, specifically to assay for the polypeptides of the present invention, particularly CSPs, e.g. by ELISA for detection of protein fluid samples, such as serum, by immunohistochemistry or laser scanning cytometry, for detection of protein in tissue samples, or by flow cytometry, for detection of intracellular protein in cell suspensions, for specific antibody-mediated isolation and/or purification of CSPs, as for example by immunoprecipitation, and for use as specific agonists or antagonists of CSPs.

[0273] One may determine whether polypeptides of the present invention including CSPs, muteins, homologous proteins or allelic variants or fusion proteins of the present invention are functional by methods known in the art. For instance, residues that are tolerant of change while retaining function can be identified by altering the polypeptide at known residues using methods known in the art, such as alanine scanning mutagenesis, Cunningham et al., Science 244(4908): 1081-5 (1989); transposon linker scanning mutagenesis, Chen et al., Gene 263(1-2): 39-48 (2001); combinations of homolog- and alanine-scanning mutagenesis, Jin et al., J. Mol. Biol. 226(3): 851-65 (1992); and combinatorial alanine scanning, Weiss et al., Proc. Natl. Acad. Sci USA 97(16): 8950-4 (2000), followed by functional assay. Transposon linker scanning kits are available commercially (New England Biolabs, Beverly, Mass., USA, catalog. no. E7-102S; EZ::TN™ In-Frame Linker Insertion Kit, catalogue no. EZI04KNT, (Epicentre Technologies Corporation, Madison, Wis., USA).

[0274] Purification of the polypeptides or fusion proteins of the present invention is well known and within the skill of one having ordinary skill in the art. See, e.g., Scopes, Protein Purification, 2d ed. (1987). Purification of recombinantly expressed polypeptides is described above. Purification of chemically-synthesized peptides can readily be effected, e.g., by HPLC.

[0275] Accordingly, it is an aspect of the present invention to provide the isolated polypeptides or fusion proteins of the present invention in pure or substantially pure form in the presence or absence of a stabilizing agent. Stabilizing agents include both proteinaceous and non-proteinaceous material and are well known in the art. Stabilizing agents, such as albumin and polyethylene glycol (PEG) are known and are commercially available.

[0276] Although high levels of purity are preferred when the isolated polypeptide or fusion protein of the present invention are used as therapeutic agents, such as in vaccines and replacement therapy, the isolated polypeptides of the present invention are also useful at lower purity. For example, partially purified polypeptides of the present invention can be used as immunogens to raise antibodies in laboratory animals.

[0277] In a preferred embodiment, the purified and substantially purified polypeptides of the present invention are in compositions that lack detectable ampholytes, acrylamide monomers, bis-acrylamide monomers, and polyacrylamide.

[0278] The polypeptides or fusion proteins of the present invention can usefully be attached to a substrate. The substrate can be porous or solid, planar or non-planar; the bond can be covalent or noncovalent. For example, the peptides of the invention may be stabilized by covalent linkage to albumin. See, U.S. Pat. No. 5,876,969, the contents of which are hereby incorporated in its entirety.

[0279] The polypeptides or fusion proteins of the present invention can also be usefully bound to a porous substrate, commonly a membrane, typically comprising nitrocellulose, polyvinylidene fluoride (PVDF), or cationically derivatized, hydrophilic PVDF; so bound, the polypeptides or fusion proteins of the present invention can be used to detect and quantify antibodies, e.g. in serum, that bind specifically to the immobilized polypeptide or fusion protein of the present invention.

[0280] As another example, the polypeptides or fusion proteins of the present invention can usefully be bound to a substantially nonporous substrate, such as plastic, to detect and quantify antibodies, e.g. in serum, that bind specifically to the immobilized protein of the present invention. Such plastics include polymethylacrylic, polyethylene, polypropylene, polyacrylate, polymethylmethacrylate, polyvinylchloride, polytetrafluoroethylene, polystyrene, polycarbonate, polyacetal, polysulfone, celluloseacetate, cellulosenitrate, nitrocellulose, or mixtures thereof; when the assay is performed in a standard microtiter dish, the plastic is typically polystyrene.

[0281] The polypeptides and fusion proteins of the present invention can also be attached to a substrate suitable for use as a surface enhanced laser desorption ionization source: so attached, the polypeptide or fusion protein of the present invention is useful for binding and then detecting secondary proteins that bind with sufficient affinity or avidity to the surface-bound polypeptide or fusion protein to indicate biologic interaction there between. The polypeptides or fusion proteins of the present invention can also be attached to a substrate suitable for use in surface plasmon resonance detection; so attached, the polypeptide or fusion protein of the present invention is useful for binding and then detecting secondary proteins that bind with sufficient affinity or avidity to the surface-bound polypeptide or fusion protein to indicate biological interaction there between.

Alternative Transcripts

[0282] In another aspect, the present invention provides splice variants of genes and proteins encoded thereby. The identification of a novel splice variant which encodes an amino acid sequence with a novel region can be targeted for the generation of reagents for use in detection and/or treatment of cancer. The novel amino acid sequence may lead to a unique protein structure, protein subcellular localization, biochemical processing or function of the splice variant. This information can be used to directly or indirectly facilitate the generation of additional or novel therapeutics or diagnostics. The nucleotide sequence in this novel splice variant can be used as a nucleic acid probe for the diagnosis and/or treatment of cancer.

[0283] Specifically, the newly identified sequences may enable the production of new antibodies or compounds directed against the novel region for use as a therapeutic or diagnostic. Alternatively, the newly identified sequences may alter the biochemical or biological properties of the encoded protein in such a way as to enable the generation of improved or different therapeutics targeting this protein.

Antibodies

[0284] In another aspect, the invention provides antibodies, including fragments and derivatives thereof, that bind specifically to polypeptides encoded by the nucleic acid molecules of the invention. In a preferred embodiment, the antibodies are specific for a polypeptide that is a CSP, or a fragment, mutein, derivative, analog or fusion protein thereof. In a more preferred embodiment, the antibodies are specific for a polypeptide that comprises SEQ ID NO: 113-259, or a fragment, mutein, derivative, analog or fusion protein thereof.

[0285] The antibodies of the present invention can be specific for linear epitopes, discontinuous epitopes, or conformational epitopes of such proteins or protein fragments, either as present on the protein in its native conformation or, in some cases, as present on the proteins as denatured, as, e.g., by solubilization in SDS. New epitopes may also be due to a difference in post translational modifications (PTMs) in disease versus normal tissue. For example, a particular site on a CSP may be glycosylated in cancerous cells, but not glycosylated in normal cells or vice versa. In addition, alternative splice forms of a CSP may be indicative of cancer. Differential degradation of the C or N-terminus of a CSP may also be a marker or target for anticancer therapy. For example, a CSP may be N-terminal degraded in cancer cells exposing new epitopes to antibodies which may selectively bind for diagnostic or therapeutic uses.

[0286] As is well known in the art, the degree to which an antibody can discriminate among molecular species in a mixture will depend, in part, upon the conformational relatedness of the species in the mixture; typically, the antibodies of the present invention will discriminate over adventitious binding to non-CSP polypeptides by at least two-fold, more typically by at least 5-fold, typically by more than 10-fold, 25-fold, 50-fold, 75-fold, and often by more than 100-fold, and on occasion by more than 500-fold or 1000-fold. When used to detect the proteins or protein fragments of the present invention, the antibody of the present invention is sufficiently specific when it can be used to determine the presence of the polypeptide of the present invention in samples derived from human colon.

[0287] Typically, the affinity or avidity of an antibody (or antibody multimer, as in the case of an IgM pentamer) of the present invention for a protein or protein fragment of the present invention will be at least about 1×10⁻⁶ molar (M), typically at least about 5×10⁻⁷ M, 1×10⁻⁷ M, with affinities and avidities of at least 1×10⁻⁸ M, 5×10⁻⁹ M, 1×10⁻¹⁰ M and up to 1×10⁻¹³ M proving especially useful.

[0288] The antibodies of the present invention can be naturally occurring forms, such as IgG, IgM, IgD, IgE, IgY, and IgA, from any avian, reptilian, or mammalian species.

[0289] Human antibodies can, but will infrequently, be drawn directly from human donors or human cells. In such case, antibodies to the polypeptides of the present invention will typically have resulted from fortuitous immunization, such as autoimmune immunization, with the polypeptide of the present invention. Such antibodies will typically, but will not invariably, be polyclonal. In addition, individual polyclonal antibodies may be isolated and cloned to generate monoclonals.

[0290] Human antibodies are more frequently obtained using transgenic animals that express human immunoglobulin genes, which transgenic animals can be affirmatively immunized with the protein immunogen of the present invention. Human Ig-transgenic mice capable of producing human antibodies and methods of producing human antibodies therefrom upon specific immunization are described, inter alia, in U.S. Pat. Nos. 6,162,963; 6,150,584; 6,114,598; 6,075,181; 5,939,598; 5,877,397; 5,874,299; 5,814,318; 5,789,650; 5,770,429; 5,661,016; 5,633,425; 5,625,126; 5,569,825; 5,545,807; 5,545,806, and 5,591,669, the disclosures of which are incorporated herein by reference in their entireties. Such antibodies are typically monoclonal, and are typically produced using techniques developed for production of murine antibodies.

[0291] Human antibodies are particularly useful, and often preferred, when the antibodies of the present invention are to be administered to human beings as in vivo diagnostic or therapeutic agents, since recipient immune response to the administered antibody will often be substantially less than that occasioned by administration of an antibody derived from another species, such as mouse.

[0292] IgG, IgM, IgD, IgE, IgY, and IgA antibodies of the present invention are also usefully obtained from other species, including mammals such as rodents (tropically mouse, but also rat, guinea pig, and hamster), lagomorphs (typically rabbits), and also larger mammals, such as sheep, goats, cows, and horses; or egg laying birds or reptiles such as chickens or alligators. In such cases, as with the transgenic human-antibody-producing non-human mammals, fortuitous immunization is not required, and the non-human mammal is typically affirmatively immunized, according to standard immunization protocols, with the polypeptide of the present invention. One form of avian antibodies may be generated using techniques described in WO 00/29444, published 25 May 2000, which is herein incorporated by reference in its entirety.

[0293] As discussed above, virtually all fragments of 8 or more contiguous amino acids of a polypeptide of the present invention can be used effectively as immunogens when conjugated to a carrier, typically a protein such as bovine thyroglobulin, keyhole limpet hemocyanin, or bovine serum albumin, conveniently using a bifunctional linker such as those described elsewhere above, which discussion is incorporated by reference here.

[0294] Immunogenicity can also be conferred by fusion of the polypeptides of the present invention to other moieties. For example, polypeptides of the present invention can be produced by solid phase synthesis on a branched polylysine core matrix; these multiple antigenic peptides (MAPs) provide high purity, increased avidity, accurate chemical definition and improved safety in vaccine development. Tam et al., Proc. Natl. Acad. Sci. USA 85: 5409-5413 (1988); Posnett et al., J. Biol. Chem. 263: 1719-1725 (1988).

[0295] Protocols for immunizing non-human mammals or avian species are well-established in the art. See Harlow et al. (eds.), Using Antibodies: A Laboratory Manual, Cold Spring Harbor Laboratory (1998); Coligan et al. (eds.), Current Protocols in Immunology, John Wiley & Sons, Inc. (2001); Zola, Monoclonal Antibodies: Preparation and Use of Monoclonal Antibodies and Engineered Antibody Derivatives (Basics: From Background to Bench), Springer Verlag (2000); Gross M, Speck J. Dtsch. Tieraztl. Wochenschr. 103: 417-422 (1996). Immunization protocols often include multiple immunizations, either with or without adjuvants such as Freund's complete adjuvant and Freund's incomplete adjuvant, and may include naked DNA immunization. Moss, Semin. Immunol. 2: 317-327 (1990).

[0296] Antibodies from non-human mammals and avian species can be polyclonal or monoclonal, with polyclonal antibodies having certain advantages in immunohistochemical detection of the polypeptides of the present invention and monoclonal antibodies having advantages in identifying and distinguishing particular epitopes of the polypeptides of the present invention. Antibodies from avian species may have particular advantage in detection of the polypeptides of the present invention, in human serum or tissues. Vikinge et al., Biosens. Bioelectron. 13: 1257-1262 (1998). Following immunization, the antibodies of the present invention can be obtained using any art-accepted technique. Such techniques are well known in the art and are described in detail in references such as Coligan, supra; Zola, supra; Howard et al. (eds.), Basic Methods in Antibody Production and Characterization, CRC Press (2000); Harlow, supra; Davis (ed.), Monoclonal Antibody Protocols, Vol. 45, Humana Press (1995); Delves (ed.), Antibody Production: Essential Techniques, John Wiley & Son Ltd (1997); and Kenney, Antibody Solution: An Antibody Methods Manual, Chapman & Hall (1997).

[0297] Briefly, such techniques include, inter alia, production of monoclonal antibodies by hybridomas and expression of antibodies or fragments or derivatives thereof from host cells engineered to express immunoglobulin genes or fragments thereof. These two methods of production are not mutually exclusive: genes encoding antibodies specific for the polypeptides of the present invention can be cloned from hybridomas and thereafter expressed in other host cells. Nor need the two necessarily be performed together: e.g., genes encoding antibodies specific for the polypeptides of the present invention can be cloned directly from B cells known to be specific for the desired protein, as further described in U.S. Pat. No. 5,627,052, the disclosure of which is incorporated herein by reference in its entirety, or from antibody-displaying phage.

[0298] Recombinant expression in host cells is particularly useful when fragments or derivatives of the antibodies of the present invention are desired.

[0299] Host cells for recombinant antibody production of whole antibodies, antibody fragments, or antibody derivatives can be prokaryotic or eukaryotic.

[0300] Prokaryotic hosts are particularly useful for producing phage displayed antibodies of the present invention.

[0301] The technology of phage-displayed antibodies, in which antibody variable region fragments are fused, for example, to the gene III protein (pIII) or gene VII protein (pVIII) for display on the surface of filamentous phage, such as M13, is by now well-established. See, e.g., Sidhu, Curr. Opin. Biotechnol. 11(6): 610-6 (2000); Griffiths et al., Curr. Opin. Biotechnol. 9(1): 102-8 (1998); Hoogenboom et al., Immunotechnology, 4(1): 1-20 (1998); Rader et al., Current Opinion in Biotechnology 8: 503-508 (1997); Aujame et al., Human Antibodies 8: 155-168 (1997); Hoogenboom, Trends in Biotechnol. 15: 62-70 (1997); de Kruif et al., 17: 453-455 (1996); Barbas et al., Trends in Biotechnol. 14: 230-234 (1996); Winter et al., Ann. Rev. Immunol 433-455 (1994). Techniques and protocols required to generate, propagate, screen (pan), and use the antibody fragments from such libraries have recently been compiled. See, e.g., Barbas (2001), supra; Kay, supra; and Abelson, supra.

[0302] Typically, phage-displayed antibody fragments are scFv fragments or Fab fragments; when desired, full length antibodies can be produced by cloning the variable regions from the displaying phage into a complete antibody and expressing the full length antibody in a further prokaryotic or a eukaryotic host cell. Eukaryotic cells are also useful for expression of the antibodies, antibody fragments, and antibody derivatives of the present invention. For example, antibody fragments of the present invention can be produced in Pichia pastoris and in Saccharomyces cerevisiae. See, e.g., Takahashi et al., Biosci. Biotechnol. Biochem. 64(10): 2138-44 (2000); Freyre et al., J. Biotechnol. 76(2-3):1 57-63 (2000); Fischer et al., Biotechnol. Appl. Biochem. 30 (Pt 2): 117-20 (1999); Pennell et al., Res. Immunol. 149(6): 599-603 (1998); Eldin et al., J. Immunol. Methods. 201(1): 67-75 (1997); Frenken et al., Res. Immunol. 149(6): 589-99 (1998); and Shusta et al., Nature Biotechnol. 16(8): 773-7 (1998).

[0303] Antibodies, including antibody fragments and derivatives, of the present invention can also be produced in insect cells. See, e.g., Li et al., Protein Expr. Purif. 21(1): 121-8 (2001); Ailor et al., Biotechnol. Bioeng. 58(2-3): 196-203 (1998); Hsu et al., Biotechnol. Prog. 13(1): 96-104 (1997); Edelman et al., Immunology, 91(1): 13-9 (1997); and Nesbit et al., J. Immunol. Methods 151(1-201-8 (1992).

[0304] Antibodies and fragments and derivatives thereof of the present invention can also be produced in plant cells, particularly maize or tobacco, Giddings et al., Nature Biotechnol. 18(11): 1151-5 (2000); Gavilondo et al., Biotechniques 29(1): 128-38 (2000); Fischer et al., J. Biol. Regul. Homeost. Agents 14(2): 83-92 (2000); Fischer et al., Biotechnol. Appl. Biochem. 30 (Pt 2): 113-6 (1999); Fischer et al., Biol. Chem. 380(7-8): 825-39 (1999); Russell, Curr. Top. Microbiol. Immunol. 240: 119-38 (1999); and Ma et al., Plant Physiol. 109(2): 341-6 (1995).

[0305] Antibodies, including antibody fragments and derivatives, of the present invention can also be produced in transgenic, non-human, mammalian milk. See, e.g. Pollock et al., J. Immunol Methods 231: 147-57 (1999); Young et al., Res. Immunol. 149: 609-10 (1998); and Limonta et al., Immunotechnology 1: 107-13 (1995).

[0306] Mammalian cells useful for recombinant expression of antibodies, antibody fragments, and antibody derivatives of the present invention include CHO cells, COS cells, 293 cells, and myeloma cells. Verma et al., J. Immunol. Methods 216(1-2):165-81 (1998) review and compare bacterial, yeast, insect and mammalian expression systems for expression of antibodies. Antibodies of the present invention can also be prepared by cell free translation, as further described in Merk et al., J. Biochem. (Tokyo) 125(2): 328-33 (1999) and Ryabova et al., Nature Biotechnol. 15(1): 79-84 (1997), and in the milk of transgenic animals, as further described in Pollock et al., J. Immunol. Methods 231(1-2): 147-57 (1999).

[0307] The invention further provides antibody fragments that bind specifically to one or more of the polypeptides of the present invention or to one or more of the polypeptides encoded by the isolated nucleic acid molecules of the present invention, or the binding of which can be competitively inhibited by one or more of the polypeptides of the present invention or one or more of the polypeptides encoded by the isolated nucleic acid molecules of the present invention. Among such useful fragments are Fab, Fab′, Fv, F(ab)′₂, and single chain Fv (scFv) fragments. Other useful fragments are described in Hudson, Curr. Opin. Biotechnol. 9(4): 395-402 (1998).

[0308] The present invention also relates to antibody derivatives that bind specifically to one or more of the polypeptides of the present invention, to one or more of the polypeptides encoded by the isolated nucleic acid molecules of the present invention, or the binding of which can be competitively inhibited by one or more of the polypeptides of the present invention or one or more of the polypeptides encoded by the isolated nucleic acid molecules of the present invention.

[0309] Among such useful derivatives are chimeric, primatized, and humanized antibodies; such derivatives are less immunogenic in human beings, and thus are more suitable for in vivo administration, than are unmodified antibodies from non-human mammalian species. Another useful method is PEGylation to increase the serum half life of the antibodies.

[0310] Chimeric antibodies typically include heavy and/or light chain variable regions (including both CDR and framework residues) of immunoglobulins of one species, typically mouse, fused to constant regions of another species, typically human. See, e.g., Morrison et al., Proc. Natl. Acad. Sci USA. 81(21): 6851-5 (1984); Sharon et al., Nature 309(5966): 364-7 (1984); Takeda et al., Nature 314(6010): 4524 (1985); and U.S. Pat. No. 5,807,715 the disclosure of which is incorporated herein by reference in its entirety. Primatized and humanized antibodies typically include heavy and/or light chain CDRs from a murine antibody grafted into a non-human primate or human antibody V region framework, usually further comprising a human constant region, Riechmann et al., Nature 332(6162): 323-7 (1988); Co et al., Nature 351(6326): 501-2 (1991); and U.S. Pat. Nos. 6,054,297; 5,821,337; 5,770,196; 5,766,886; 5,821,123; 5,869,619; 6,180,377; 6,013,256; 5,693,761; and 6,180,370, the disclosures of which are incorporated herein by reference in their entireties. Other useful antibody derivatives of the invention include heteromeric antibody complexes and antibody fusions, such as diabodies (bispecific antibodies), single-chain diabodies, and intrabodies.

[0311] It is contemplated that the nucleic acids encoding the antibodies of the present invention can be operably joined to other nucleic acids forming a recombinant vector for cloning or for expression of the antibodies of the invention. Accordingly, the present invention includes any recombinant vector containing the coding sequences, or part thereof, whether for eukaryotic transduction, transfection or gene therapy. Such vectors may be prepared using conventional molecular biology techniques, known to those with skill in the art, and would comprise DNA encoding sequences for the immunoglobulin V-regions including framework and CDRs or parts thereof, and a suitable promoter either with or without a signal sequence for intracellular transport. Such vectors may be transduced or transfected into eukaryotic cells or used for gene therapy (Marasco et al., Proc. Natl. Acad. Sci. (USA) 90: 7889-7893 (1993); Duan et al., Proc. Natl. Acad. Sci. (USA) 91: 5075-5079 (1994), by conventional techniques, known to those with skill in the art.

[0312] The antibodies of the present invention, including fragments and derivatives thereof, can usefully be labeled. It is, therefore, another aspect of the present invention to provide labeled antibodies that bind specifically to one or more of the polypeptides of the present invention, to one or more of the polypeptides encoded by the isolated nucleic acid molecules of the present invention, or the binding of which can be competitively inhibited by one or more of the polypeptides of the present invention or one or more of the polypeptides encoded by the isolated nucleic acid molecules of the present invention. The choice of label depends, in part, upon the desired use.

[0313] For example, when the antibodies of the present invention are used for immunohistochemical staining of tissue samples, the label can usefully be an enzyme that catalyzes production and local deposition of a detectable product. Enzymes typically conjugated to antibodies to permit their immunohistochemical visualization are well known, and include alkaline phosphatase, β-galactosidase, glucose oxidase, horseradish peroxidase (HRP), and urease. Typical substrates for production and deposition of visually detectable products include o-nitrophenyl-beta-D-galactopyranoside (ONPG); o-phenylenediamine dihydrochloride (OPD); p-nitrophenyl phosphate (PNPP); p-nitrophenyl-beta-D-galactopryanoside (PNPG); 3′,3′-diaminobenzidine (DAB); 3-amino-9-ethylcarbazole (AEC); 4-chloro-1-naphthol (CN); 5-bromo-4-chloro-3-indolyl-phosphate (BCIP); ABTS®; BluoGal; iodonitrotetrazolium (INT); nitroblue tetrazolium chloride (NBT); phenazine methosulfate (PMS); phenolphthalein monophosphate (PMP); tetramethyl benzidine (TMB); tetranitroblue tetrazolium (TNBT); X-Gal; X-Gluc; and X-Glucoside.

[0314] Other substrates can be used to produce products for local deposition that are luminescent. For example, in the presence of hydrogen peroxide (H₂O₂), horseradish peroxidase (HRP) can catalyze the oxidation of cyclic diacylhydrazides, such as luminol. Immediately following the oxidation, the luminol is in an excited state (intermediate reaction product), which decays to the ground state by emitting light. Strong enhancement of the light emission is produced by enhancers, such as phenolic compounds. Advantages include high sensitivity, high resolution, and rapid detection without radioactivity and requiring only small amounts of antibody. See, e.g., Thorpe et al., Methods Enzymol. 133: 331-53 (1986); Kricka et al., J. Immunoassay 17(1): 67-83 (1996); and Lundqvist et al., J. Biolumin. Chemilumin. 10(6): 353-9 (1995). Kits for such enhanced chemiluminescent detection (ECL) are available commercially. The antibodies can also be labeled using colloidal gold.

[0315] As another example, when the antibodies of the present invention are used, e.g., for flow cytometric detection, for scanning laser cytometric detection, or for fluorescent immunoassay, they can usefully be labeled with fluorophores. There are a wide variety of fluorophore labels that can usefully be attached to the antibodies of the present invention. For flow cytometric applications, both for extracellular detection and for intracellular detection, common useful fluorophores can be fluorescein isothiocyanate (FITC), allophycocyanin (APC), R-phycoerythrin (PE), peridinin chlorophyll protein (PerCP), Texas Red, Cy3, Cy5, fluorescence resonance energy tandem fluorophores such as PerCP-Cy5.5, PE-Cy5, PE-Cy5.5, PE-Cy7, PE-Texas Red, and APC-Cy7.

[0316] Other fluorophores include, inter alia, Alexa Fluor® 350, Alexa Fluor® 488, Alexa Fluor® 532, Alexa Fluor® 546, Alexa Fluor® 568, Alexa Fluor® 594, Alexa Fluor® 647 (monoclonal antibody labeling kits available from Molecular Probes, Inc., Eugene, Oreg., USA), BODIPY dyes, such as BODIPY 493/503, BODIPY FL, BODIPY R6G, BODIPY 530/550, BODIPY TMR, BODIPY 558/568, BODIPY 558/568, BODIPY 564/570, BODIPY 576/589, BODIPY 581/591, BODIPY TR, BODIPY 630/650, BODIPY 650/665, Cascade Blue, Cascade Yellow, Dansyl, lissamine rhodamine B, Marina Blue, Oregon Green 488, Oregon Green 514, Pacific Blue, rhodamine 6G, rhodamine green, rhodamine red, tetramethylrhodamine, Texas Red (available from Molecular Probes, Inc., Eugene, Oreg., USA), and Cy2, Cy3, Cy3.5, Cy5, Cy5.5, Cy7, all of which are also useful for fluorescently labeling the antibodies of the present invention.

[0317] For secondary detection using labeled avidin, streptavidin, captavidin or neutravidin, the antibodies of the present invention can usefully be labeled with biotin.

[0318] When the antibodies of the present invention are used, e.g., for western blotting applications, they can usefully be labeled with radioisotopes, such as ³³P, ³²P, ³⁵S, ³H, and ¹²⁵I. As another example, when the antibodies of the present invention are used for radioimmunotherapy, the label can usefully be ²²⁸Th, ²²⁷Ac, ²²⁵Ac, ²²³Ra, ²¹³Bi, ²¹²Pb, ²¹²Bi, ²¹¹At, ²⁰³Pb, ¹⁹⁴Os, ¹⁸⁸Re, ¹⁸⁶Re, ¹⁵³Sm, ¹⁴⁹Tb, ¹³¹I, ¹²⁵I, ¹¹In, ¹⁰⁵Rh, ^{99m}Tc, ⁹⁷Ru, ⁹⁰Y, ⁹⁰Sr, ⁸⁸Y, ⁷²Se, ⁶⁷Cu, or ⁴⁷Sc.

[0319] As another example, when the antibodies of the present invention are to be used for in vivo diagnostic use, they can be rendered detectable by conjugation to MRI contrast agents, such as gadolinium diethylenetriaminepentaacetic acid (DTPA), Lauffer et al., Radiology 207(2): 529-38 (1998), or by radioisotopic labeling.

[0320] As would be understood, use of the labels described above is not restricted to the application as for which they were mentioned.

[0321] The antibodies of the present invention, including fragments and derivatives thereof, can also be conjugated to toxins, in order to target the toxin's ablative action to cells that display and/or express the polypeptides of the present invention. Commonly, the antibody in such immunotoxins is conjugated to Pseudomonas exotoxin A, diphtheria toxin, shiga toxin A, anthrax toxin lethal factor, or ricin. See Hall (ed.), Immunotoxin Methods and Protocols (Methods in Molecular Biology, vol. 166), Humana Press (2000); and Frankel et al. (eds.), Clinical Applications of Immunotoxins, Springer-Verlag (1998).

[0322] The antibodies of the present invention can usefully be attached to a substrate, and it is, therefore, another aspect of the invention to provide antibodies that bind specifically to one or more of the polypeptides of the present invention, to one or more of the polypeptides encoded by the isolated nucleic acid molecules of the present invention, or the binding of which can be competitively inhibited by one or more of the polypeptides of the present invention or one or more of the polypeptides encoded by the isolated nucleic acid molecules of the present invention, attached to a substrate. Substrates can be porous or nonporous, planar or nonplanar. For example, the antibodies of the present invention can usefully be conjugated to filtration media, such as NH S-activated Sepharose or CNBr-activated Sepharose for purposes of immunoaffinity chromatography. For example, the antibodies of the present invention can usefully be attached to paramagnetic microspheres, typically by biotin-streptavidin interaction, which microsphere can then be used for isolation of cells that express or display the polypeptides of the present invention. As another example, the antibodies of the present invention can usefully be attached to the surface of a microtiter plate for ELISA.

[0323] As noted above, the antibodies of the present invention can be produced in prokaryotic and eukaryotic cells. It is, therefore, another aspect of the present invention to provide cells that express the antibodies of the present invention, including hybridoma cells, B cells, plasma cells, and host cells recombinantly modified to express the antibodies of the present invention.

[0324] In yet a further aspect, the present invention provides aptamers evolved to bind specifically to one or more of the CSPs of the present invention or to polypeptides encoded by the CSNAs of the invention.

[0325] In sum, one of skill in the art, provided with the teachings of this invention, has available a variety of methods which may be used to alter the biological properties of the antibodies of this invention including methods which would increase or decrease the stability or half-life, immunogenicity, toxicity, affinity or yield of a given antibody molecule, or to alter it in any other way that may render it more suitable for a particular application.

Transgenic Animals and Cells

[0326] In another aspect, the invention provides transgenic cells and non-human organisms comprising nucleic acid molecules of the invention. In a preferred embodiment, the transgenic cells and non-human organisms comprise a nucleic acid molecule encoding a CSP. In a preferred embodiment, the CSP comprises an amino acid sequence selected from SEQ ID NO: 113-259, or a fragment, mutein, homologous protein or allelic variant thereof. In another preferred embodiment, the transgenic cells and non-human organism comprise a CSNA of the invention, preferably a CSNA comprising a nucleotide sequence selected from the group consisting of SEQ ID NO: 1-112, or a part, substantially similar nucleic acid molecule, allelic variant or hybridizing nucleic acid molecule thereof.

[0327] In another embodiment, the transgenic cells and non-human organisms have a targeted disruption or replacement of the endogenous orthologue of the human CSG. The transgenic cells can be embryonic stem cells or somatic cells. The transgenic non-human organisms can be chimeric, nonchimeric heterozygotes, and nonchimeric homozygotes. Methods of producing transgenic animals are well known in the art. See, e.g., Hogan et al., Manipulating the Mouse Embryo: A Laboratory Manual, 2d ed., Cold Spring Harbor Press (1999); Jackson et al., Mouse Genetics and Transgenics: A Practical Approach, Oxford University Press (2000); and Pinkert, Transgenic Animal Technology: A Laboratory Handbook, Academic Press (1999).

[0328] Any technique known in the art may be used to introduce a nucleic acid molecule of the invention into an animal to produce the founder lines of transgenic animals. Such techniques include, but are not limited to, pronuclear microinjection. (see, e.g., Paterson et al., Appl. Microbiol. Biotechnol. 40: 691-698 (1994); Carver et al., Biotechnology 11: 1263-1270 (1993); Wright et al., Biotechnology 9: 830-834 (1991); and U.S. Pat. No. 4,873,191, herein incorporated by reference in its entirety); retrovirus-mediated gene transfer into germ lines, blastocysts or embryos (see, e.g., Van der Putten et al., Proc. Natl. Acad. Sci., USA 82: 6148-6152 (1985)); gene targeting in embryonic stem cells (see, e.g., Thompson et al., Cell 56: 313-321 (1989)); electroporation of cells or embryos (see, e.g., Lo, 1983, Mol. Cell. Biol. 3: 1803-1814 (1983)); introduction using a gene gun (see, e.g., Ulmer et al., Science 59: 1745-49 (1993); introducing nucleic acid constructs into embryonic pleuripotent stem cells and transferring the stem cells back into the blastocyst; and sperm-mediated gene transfer (see, e.g., Lavitrano et al., Cell 57: 717-723 (1989)).

[0329] Other techniques include, for example, nuclear transfer into enucleated oocytes of nuclei from cultured embryonic, fetal, or adult cells induced to quiescence (see, e.g., Campell et al., Nature 380: 64-66 (1996); Wilmut et al., Nature 385: 810-813 (1997)). The present invention provides for transgenic animals that carry the transgene (i.e., a nucleic acid molecule of the invention) in all their cells, as well as animals which carry the transgene in some, but not all their cells, i.e. e., mosaic animals or chimeric animals.

[0330] The transgene may be integrated as a single transgene or as multiple copies, such as in concatamers, e.g., head-to-head tandems or head-to-tail tandems. The transgene may also be selectively introduced into and activated in a particular cell type by following, e.g., the teaching of Lasko et al. et al., Proc. Natl. Acad. Sci. USA 89: 6232-6236 (1992). The regulatory sequences required for such a cell-type specific activation skill depend upon the particular cell type of interest, and will be apparent to those of skill in the art.

[0331] Once transgenic animals have been generated, the expression of the recombinant gene may be assayed utilizing standard techniques. Initial screening may be accomplished by Southern blot analysis or PCR techniques to analyze animal tissues to verify that integration of the transgene has taken place. The level of ARENA expression of the transgene in the tissues of the transgenic animals may also be assessed using techniques which include, but are not limited to, Northern blot analysis of tissue samples obtained from the animal, in situ hybridization analysis, and reverse transcriptase-PCR (RT-PCR). Samples of transgenic gene-expressing tissue may also be evaluated immunocytochemically or immunohistochemically using antibodies specific for the transgene product.

[0332] Once the founder animals are produced, they may be bred, inbred, outbred, or crossbred to produce colonies of the particular animal. Examples of such breeding strategies include, but are not limited to: outbreeding of founder animals with more than one integration site in order to establish separate lines; inbreeding of separate lines in order to produce compound transgenics that express the transgene at higher levels because of the effects of additive expression of each transgene; crossing of heterozygous transgenic animals to produce animals homozygous for a given integration site in order to both augment expression and eliminate the need for screening of animals by DNA analysis; crossing of separate homozygous lines to produce compound heterozygous or homozygous lines; and breeding to place the transgene on a distinct background that is appropriate for an experimental model of interest.

[0333] Transgenic animals of the invention have uses which include, but are not limited to, animal model systems useful in elaborating the biological function of polypeptides of the present invention, studying conditions and/or disorders associated with aberrant expression, and in screening for compounds effective in ameliorating such conditions and/or disorders.

[0334] Methods for creating a transgenic animal with a disruption of a targeted gene are also well known in the art. In general, a vector is designed to comprise some nucleotide sequences homologous to the endogenous targeted gene. The vector is introduced into a cell so that it may integrate, via homologous recombination with chromosomal sequences, into the endogenous gene, thereby disrupting the function of the endogenous gene. The transgene may also be selectively introduced into a particular cell type, thus inactivating the endogenous gene in only that cell type. See, e.g., Gu et al., Science 265:103-106 (1994). The regulatory sequences required for such a cell-type specific inactivation will depend upon the particular cell type of interest, and will be apparent to those of skill in the art. See, e.g., Smithies et al., Nature 317: 230-234 (1985); Thomas et al., Cell 51: 503-512 (1987); Thompson et al., Cell 5: 313-321(1989).

[0335] In one embodiment, a mutant, non-functional nucleic acid molecule of the invention (or a completely unrelated DNA sequence) flanked by DNA homologous to the endogenous nucleic acid sequence (either the coding regions or regulatory regions of the gene) can be used, with or without a selectable marker and/or a negative selectable marker, to transfect cells that express polypeptides of the invention in vivo. In another embodiment, techniques known in the art are used to generate knockouts in cells that contain, but do not express the gene of interest. Insertion of the DNA construct, via targeted homologous recombination, results in inactivation of the targeted gene. Such approaches are particularly suited in research and agricultural fields where modifications to embryonic stem cells can be used to generate animal offspring with an inactive targeted gene. See, e.g., Thomas, supra and Thompson, supra. However this approach can be routinely adapted for use in humans provided the recombinant DNA constructs are directly administered or targeted to the required site in vivo using appropriate viral vectors that will be apparent to those of skill in the art.

[0336] In further embodiments of the invention, cells that are genetically engineered to express the polypeptides of the invention, or alternatively, that are genetically engineered not to express the polypeptides of the invention (e.g., knockouts) are administered to a patient in vivo. Such cells may be obtained from an animal or patient or an MHC compatible donor and can include, but are not limited to fibroblasts, bone marrow cells, blood cells (e.g., lymphocytes), adipocytes, muscle cells, endothelial cells etc. The cells are genetically engineered in vitro using recombinant DNA techniques to introduce the coding sequence of polypeptides of the invention into the cells, or alternatively, to disrupt the coding sequence and/or endogenous regulatory sequence associated with the polypeptides of the invention, e.g., by transduction (using viral vectors, and preferably vectors that integrate the transgene into the cell genome) or transfection procedures, including, but not limited to, the use of plasmids, cosmids, YACs, naked DNA, electroporation, liposomes, etc.

[0337] The coding sequence of the polypeptides of the invention can be placed under the control of a strong constitutive or inducible promoter or promoter/enhancer to achieve expression, and preferably secretion, of the polypeptides of the invention. The engineered cells which express and preferably secrete the polypeptides of the invention can be introduced into the patient systemically, e.g., in the circulation, or intraperitoneally.

[0338] Alternatively, the cells can be incorporated into a matrix and implanted in the body, e.g., genetically engineered fibroblasts can be implanted as part of a skin graft; genetically engineered endothelial cells can be implanted as part of a lymphatic or vascular graft. See, e.g., U.S. Pat. Nos. 5,399,349 and 5,460,959, each of which is incorporated by reference herein in its entirety.

[0339] When the cells to be administered are non-autologous or non-MHC compatible cells, they can be administered using well known techniques which prevent the development of a host immune response against the introduced cells. For example, the cells may be introduced in an encapsulated form which, while allowing for an exchange of components with the immediate extracellular environment, does not allow the introduced cells to be recognized by the host immune system.

[0340] Transgenic and “knock-out” animals of the invention have uses which include, but are not limited to, animal model systems useful in elaborating the biological function of polypeptides of the present invention, studying conditions and/or disorders associated with aberrant expression, and in screening for compounds effective in ameliorating such conditions and/or disorders.

Computer Readable Means

[0341] A further aspect of the invention is a computer readable means for storing the nucleic acid and amino acid sequences of the instant invention. In a preferred embodiment, the invention provides a computer readable means for storing SEQ ID NO: 113-259 and SEQ ID NO: 1-112 as described herein, as the complete set of sequences or in any combination. The records of the computer readable means can be accessed for reading and display and for interface with a computer system for the application of programs allowing for the location of data upon a query for data meeting certain criteria, the comparison of sequences, the alignment or ordering of sequences meeting a set of criteria, and the like.

[0342] The nucleic acid and amino acid sequences of the invention are particularly useful as components in databases useful for search analyses as well as in sequence analysis algorithms. As used herein, the terms “nucleic acid sequences of the invention” and “amino acid sequences of the invention” mean any detectable chemical or physical characteristic of a polynucleotide or polypeptide of the invention that is or may be reduced to or stored in a computer readable form. These include, without limitation, chromatographic scan data or peak data, photographic data or scan data therefrom, and mass spectrographic data.

[0343] This invention provides computer readable media having stored thereon sequences of the invention. A computer readable medium may comprise one or more of the following: a nucleic acid sequence comprising a sequence of a nucleic acid sequence of the invention; an amino acid sequence comprising an amino acid sequence of the invention; a set of nucleic acid sequences wherein at least one of said sequences comprises the sequence of a nucleic acid sequence of the invention; a set of amino acid sequences wherein at least one of said sequences comprises the sequence of an amino acid sequence of the invention; a data set representing a nucleic acid sequence comprising the sequence of one or more nucleic acid sequences of the invention; a data set representing a nucleic acid sequence encoding an amino acid sequence comprising the sequence of an amino acid sequence of the invention; a set of nucleic acid sequences wherein at least one of said sequences comprises the sequence of a nucleic acid sequence of the invention; a set of amino acid sequences wherein at least one of said sequences comprises the sequence of an amino acid sequence of the invention; a data set representing a nucleic acid sequence comprising the sequence of a nucleic acid sequence of the invention; a data set representing a nucleic acid sequence encoding an amino acid sequence comprising the sequence of an amino acid sequence of the invention. The computer readable medium can be any composition of matter used to store information or data, including, for example, commercially available floppy disks, tapes, hard drives, compact disks, and video disks.

[0344] Also provided by the invention are methods for the analysis of character sequences, particularly genetic sequences. Preferred methods of sequence analysis include, for example, methods of sequence homology analysis, such as identity and similarity analysis, RNA structure analysis, sequence assembly, cladistic analysis, sequence motif analysis, open reading frame determination, nucleic acid base calling, and sequencing chromatogram peak analysis.

[0345] A computer-based method is provided for performing nucleic acid sequence identity or similarity identification. This method comprises the steps of providing a nucleic acid sequence comprising the sequence of a nucleic acid of the invention in a computer readable medium; and comparing said nucleic acid sequence to at least one nucleic acid or amino acid sequence to identify sequence identity or similarity.

[0346] A computer-based method is also provided for performing amino acid homology identification, said method comprising the steps of: providing an amino acid sequence comprising the sequence of an amino acid of the invention in a computer readable medium; and comparing said amino acid sequence to at least one nucleic acid or an amino acid sequence to identify homology.

[0347] A computer-based method is still further provided for assembly of overlapping nucleic acid sequences into a single nucleic acid sequence, said method comprising the steps of: providing a first nucleic acid sequence comprising the sequence of a nucleic acid of the invention in a computer readable medium; and screening for at least one overlapping region between said first nucleic acid sequence and a second nucleic acid sequence. In addition, the invention includes a method of using patterns of expression associated with either the nucleic acids or proteins in a computer-based method to diagnose disease.

Diagnostic Methods for Colon Cancer

[0348] The present invention also relates to quantitative and qualitative diagnostic assays and methods for detecting, diagnosing, monitoring, staging and predicting cancers by comparing expression of a CSNA or a CSP in a human patient that has or may have colon cancer, or who is at risk of developing colon cancer, with the expression of a CSNA or a CSP in a normal human control. For purposes of the present invention, “expression of a CSNA” or “CSNA expression” means the quantity of CSNA mRNA that can be measured by any method known in the art or the level of transcription that can be measured by any method known in the art in a cell, tissue, organ or whole patient. Similarly, the term “expression of a CSP” or “CSP expression” means the amount of CSP that can be measured by any method known in the art or the level of translation of a CSNA that can be measured by any method known in the art.

[0349] The present invention provides methods for diagnosing colon cancer in a patient, in particular adenocarcinoma, by analyzing for changes in levels of CSNA or CSP in cells, tissues, organs or bodily fluids compared with levels of CSNA or CSP in cells, tissues, organs or bodily fluids of preferably the same type from a normal human control, wherein an increase, or decrease in certain cases, in levels of a CSNA or CSP in the patient versus the normal human control is associated with the presence of colon cancer or with a predilection to the disease. In another preferred embodiment, the present invention provides methods for diagnosing colon cancer in a patient by analyzing changes in the structure of the mRNA of a CSG compared to the mRNA from a normal control. These changes include, without limitation, aberrant splicing, alterations in polyadenylation and/or alterations in 5′ nucleotide capping. In yet another preferred embodiment, the present invention provides methods for diagnosing colon cancer in a patient by analyzing changes in a CSP compared to a CSP from a normal patient. These changes include, e.g., alterations, including post translational modifications such as glycosylation and/or phosphorylation of the CSP or changes in the subcellular CSP localization.

[0350] For purposes of the present invention, diagnosing means that CSNA or CSP levels are used to determine the presence or absence of disease in a patient. As will be understood by those of skill in the art, measurement of other diagnostic parameters may be required for definitive diagnosis or determination of the appropriate treatment for the disease. The determination may be made by a clinician, a doctor, a testing laboratory, or a patient using an over the counter test. The patient may have symptoms of disease or may be asymptomatic. In addition, the CSNA or CSP levels of the present invention may be used as screening marker to determine whether further tests or biopsies are warranted. In addition, the CSNA or CSP levels may be used to determine the vulnerability or susceptibility to disease.

[0351] In a preferred embodiment, the expression of a CSNA is measured by determining the amount of a mRNA that encodes an amino acid sequence selected from SEQ ID NO: 113-259, a homolog, an allelic variant, or a fragment thereof. In a more preferred embodiment, the CSNA expression that is measured is the level of expression of a CSNA mRNA selected from SEQ ID NO: 1-112, or a hybridizing nucleic acid, homologous nucleic acid or allelic variant thereof, or a part of any of these nucleic acid molecules. CSNA expression may be measured by any method known in the art, such as those described supra, including measuring mRNA expression by Northern blot, quantitative or qualitative reverse transcriptase PCR (RT-PCR), microarray, dot or slot blots or in situ hybridization. See, e.g., Ausubel (1992), supra; Ausubel (1999), supra; Sambrook (1989), supra; and Sambrook (2001), supra. CSNA transcription may be measured by any method known in the art including using a reporter gene hooked up to the promoter of a CSG of interest or doing nuclear run-off assays. Alterations in mRNA structure, e.g., aberrant splicing variants, may be determined by any method known in the art, including, RT-PCR followed by sequencing or restriction analysis. As necessary, CSNA expression may be compared to a known control, such as normal colon nucleic acid, to detect a change in expression.

[0352] In another preferred embodiment, the expression of a CSP is measured by determining the level of a CSP having an amino acid sequence selected from the group consisting of SEQ ID NO: 113-259, a homolog, an allelic variant, or a fragment thereof. Such levels are preferably determined in at least one of cells, tissues, organs and/or bodily fluids, including determination of normal and abnormal levels. Thus, for instance, a diagnostic assay in accordance with the invention for diagnosing over- or underexpression of a CSNA or CSP compared to normal control bodily fluids, cells, or tissue samples may be used to diagnose the presence of colon cancer. The expression level of a CSP may be determined by any method known in the art, such as those described supra. In a preferred embodiment, the CSP expression level may be determined by radioimmunoassays, competitive-binding assays, ELISA, Western blot, FACS, immunohistochemistry, immunoprecipitation, proteomic approaches: two-dimensional gel electrophoresis (2D electrophoresis) and non-gel-based approaches such as mass spectrometry or protein interaction profiling. See, e.g, Harlow (1999), supra; Ausubel (1992), supra; and Ausubel (1999), supra. Alterations in the CSP structure may be determined by any method known in the art, including, e.g., using antibodies that specifically recognize phosphoserine, phosphothreonine or phosphotyrosine residues, two-dimensional polyacrylamide gel electrophoresis (2D PAGE) and/or chemical analysis of amino acid residues of the protein. Id.

[0353] In a preferred embodiment, a radioimmunoassay (RIA) or an ELISA is used. An antibody specific to a CSP is prepared if one is not already available. In a preferred embodiment, the antibody is a monoclonal antibody. The anti-CSP antibody is bound to a solid support and any free protein binding sites on the solid support are blocked with a protein such as bovine serum albumin. A sample of interest is incubated with the antibody on the solid support under conditions in which the CSP will bind to the anti-CSP antibody. The sample is removed, the solid support is washed to remove unbound material, and an anti-CSP antibody that is linked to a detectable reagent (a radioactive substance for RIA and an enzyme for ELISA) is added to the solid support and incubated under conditions in which binding of the CSP to the labeled antibody will occur. After binding, the unbound labeled antibody is removed by washing. For an ELISA, one or more substrates are added to produce a colored reaction product that is based upon the amount of a CSP in the sample. For an RIA, the solid support is counted for radioactive decay signals by any method known in the art. Quantitative results for both RIA and ELISA typically are obtained by reference to a standard curve.

[0354] Other methods to measure CSP levels are known in the art. For instance, a competition assay may be employed wherein an anti-CSP antibody is attached to a solid support and an allocated amount of a labeled CSP and a sample of interest are incubated with the solid support. The amount of labeled CSP attached to the solid support can be correlated to the quantity of a CSP in the sample.

[0355] Of the proteomic approaches, 2D PAGE is a well known technique. Isolation of individual proteins from a sample such as serum is accomplished using sequential separation of proteins by isoelectric point and molecular weight. Typically, polypeptides are first separated by isoelectric point (the first dimension) and then separated by size using an electric current (the second dimension). In general, the second dimension is perpendicular to the first dimension. Because no two proteins with different sequences are identical on the basis of both size and charge, the result of 2D PAGE is a roughly square gel in which each protein occupies a unique spot. Analysis of the spots with chemical or antibody probes, or subsequent protein microsequencing can reveal the relative abundance of a given protein and the identity of the proteins in the sample.

[0356] Expression levels of a CSNA can be determined by any method known in the art, including PCR and other nucleic acid methods, such as ligase chain reaction (LCR) and nucleic acid sequence based amplification (NASBA), can be used to detect malignant cells for diagnosis and monitoring of various malignancies. For example, reverse-transcriptase PCR (RT-PCR) is a powerful technique which can be used to detect the presence of a specific mRNA population in a complex mixture of thousands of other mRNA species. In RT-PCR, an mRNA species is first reverse transcribed to complementary DNA (cDNA) with use of the enzyme reverse transcriptase; the cDNA is then amplified as in a standard PCR reaction.

[0357] Hybridization to specific DNA molecules (e.g., oligonucleotides) arrayed on a solid support can be used to both detect the expression of and quantitate the level of expression of one or more CSNAs of interest. In this approach, all or a portion of one or more CSNAs is fixed to a substrate. A sample of interest, which may comprise RNA, e.g., total RNA or polyA-selected mRNA, or a complementary DNA (cDNA) copy of the RNA is incubated with the solid support under conditions in which hybridization will occur between the DNA on the solid support and the nucleic acid molecules in the sample of interest. Hybridization between the substrate-bound DNA and the nucleic acid molecules in the sample can be detected and quantitated by several means, including, without limitation, radioactive labeling or fluorescent labeling of the nucleic acid molecule or a secondary molecule designed to detect the hybrid.

[0358] The above tests can be carried out on samples derived from a variety of cells, bodily fluids and/or tissue extracts such as homogenates or solubilized tissue obtained from a patient. Tissue extracts are obtained routinely from tissue biopsy and autopsy material. Bodily fluids useful in the present invention include blood, urine, saliva or any other bodily secretion or derivative thereof. As used herein “blood” includes whole blood, plasma, serum, circulating epithelial cells, constituents, or any derivative of blood.

[0359] In addition to detection in bodily fluids, the proteins and nucleic acids of the invention are suitable to detection by cell capture technology. Whole cells may be captured by a variety methods for example magnetic separation, such as described in U.S. Pat. Nos. 5,200,084; 5,186,827; 5,108,933; and 4,925,788, the disclosures of which are incorporated herein by reference in their entireties. Epithelial cells may be captured using such products as Dynabeads® or CELLection™ (Dynal Biotech, Oslo, Norway). Alternatively, fractions of blood may be captured, e.g., the buffy coat fraction (50 mm cells isolated from 5 ml of blood) containing epithelial cells. In addition, cancer cells may be captured using the techniques described in WO 00/47998, the disclosure of which is incorporated herein by reference in its entirety. Once the cells are captured or concentrated, the proteins or nucleic acids are detected by the means described in the subject application. Alternatively, nucleic acids may be captured directly from blood samples, see U.S. Pat. Nos. 6,156,504, 5,501,963; or WO 01/42504, the disclosures of which are incorporated herein by reference in their entireties.

[0360] In a preferred embodiment, the specimen tested for expression of CSNA or CSP includes without limitation colon tissue, fecal samples, colonocytes, colon cells grown in cell culture, blood, serum, lymph node tissue, and lymphatic fluid. In another preferred embodiment, especially when metastasis of a primary colon cancer is known or suspected, specimens include, without limitation, tissues from brain, bone, bone marrow, liver, lungs, and adrenal glands. In general, the tissues may be sampled by biopsy, including, without limitation, needle biopsy, e.g., transthoracic needle aspiration, cervical mediatinoscopy, endoscopic lymph node biopsy, video-assisted thoracoscopy, exploratory thoracotomy, bone marrow biopsy and bone marrow aspiration.

[0361] Colonocytes represent an important source of the CSP or CSNA because they provide a picture of the immediate past metabolic history of the GI tract of a subject. In addition, such cells are representative of the cell population from a statistically large sampling frame reflecting the state of the colonic mucosa along the entire length of the colon in a non-invasive manner, in contrast to a limited sampling by colonic biopsy using an invasive procedure involving endoscopy. Specific examples of patents describing the isolation of colonocytes include U.S. Pat. Nos. 6,335,193; 6,020,137 5,741,650; 6,258,541; US 2001 0026925 A1; WO 00/63358 A1, the disclosures of which are incorporated herein by reference in their entireties.

[0362] All the methods of the present invention may optionally include determining the expression levels of one or more other cancer markers in addition to determining the expression level of a CSNAs or CSP. In many cases, the use of another cancer marker will decrease the likelihood of false positives or false negatives. In one embodiment, the one or more other cancer markers include other CSNA or CSPs as disclosed herein. Other cancer markers useful in the present invention will depend on the cancer being tested and are known to those of skill in the art. In a preferred embodiment, at least one other cancer marker in addition to a particular CSNA or CSP is measured. In a more preferred embodiment, at least two other additional cancer markers are used. In an even more preferred embodiment, at least three, more preferably at least five, even more preferably at least ten additional cancer markers are used.

[0363] Diagnosing

[0364] In one aspect, the invention provides a method for determining the expression levels and/or structural alterations of one or more CSNA and/or CSP in a sample from a patient suspected of having colon cancer. In general, the method comprises the steps of obtaining the sample from the patient, determining the expression level or structural alterations of a CSNA and/or CSP and then ascertaining whether the patient has colon cancer from the expression level of the CSNA or CSP. In general, if high expression relative to a control of a CSNA or CSP is indicative of colon cancer, a diagnostic assay is considered positive if the level of expression of the CSNA or CSP is at least one and a half times higher, and more preferably are at least two times higher, still more preferably five times higher, even more preferably at least ten times higher, than in preferably the same cells, tissues or bodily fluid of a normal human control. In contrast, if low expression relative to a control of a CSNA or CSP is indicative of colon cancer, a diagnostic assay is considered positive if the level of expression of the CSNA or CSP is at least one and a half times lower, and more preferably are at least two times lower, still more preferably five times lower, even more preferably at least ten times lower than in preferably the same cells, tissues or bodily fluid of a normal human control. The normal human control may be from a different patient or from uninvolved tissue of the same patient.

[0365] The present invention also provides a method of determining whether colon cancer has metastasized in a patient. One may identify whether the colon cancer has metastasized by measuring the expression levels and/or structural alterations of one or more CSNAs and/or CSPs in a variety of tissues. The presence of a CSNA or CSP in a tissue other than colon at levels higher than that of corresponding noncancerous tissue (e.g., the same tissue from another individual) is indicative of metastasis if high level expression of a CSNA or CSP is associated with colon cancer. Similarly, the presence of a CSNA or CSP in a tissue other than colon at levels lower than that of corresponding noncancerous tissue is indicative of metastasis if low level expression of a CSNA or CSP is associated with colon cancer. Further, the presence of a structurally altered CSNA or CSP that is associated with colon cancer is also indicative of metastasis.

[0366] In general, if high expression relative to a control of a CSNA or CSP is indicative of metastasis, an assay for metastasis is considered positive if the level of expression of the CSNA or CSP is at least one and a half times higher, and more preferably are at least two times higher, still more preferably five times higher, even more preferably at least ten times higher, than in preferably the same cells, tissues or bodily fluid of a normal human control. In contrast, if low expression relative to a control of a CSNA or CSP is indicative of metastasis, an assay for metastasis is considered positive if the level of expression of the CSNA or CSP is at least one and a half times lower, and more preferably are at least two times lower, still more preferably five times lower, even more preferably at least ten times lower than in preferably the same cells, tissues or bodily fluid of a normal human control.

[0367] Staging

[0368] The invention also provides a method of staging colon cancer in a human patient. The method comprises identifying a human patient having colon cancer and analyzing cells, tissues or bodily fluids from such human patient for expression levels and/or structural alterations of one or more CSNAs or CSPs. First, one or more tumors from a variety of patients are staged according to procedures well known in the art, and the expression levels of one or more CSNAs or CSPs is determined for each stage to obtain a standard expression level for each CSNA and CSP. Then, the CSNA or CSP expression levels of the CSNA or CSP are determined in a biological sample from a patient whose stage of cancer is not known. The CSNA or CSP expression levels from the patient are then compared to the standard expression level. By comparing the expression level of the CSNAs and CSPs from the patient to the standard expression levels, one may determine the stage of the tumor. The same procedure may be followed using structural alterations of a CSNA or CSP to determine the stage of a colon cancer.

[0369] Monitoring

[0370] Further provided is a method of monitoring colon cancer in a human patient. One may monitor a human patient to determine whether there has been metastasis and, if there has been, when metastasis began to occur. One may also monitor a human patient to determine whether a preneoplastic lesion has become cancerous. One may also monitor a human patient to determine whether a therapy, e.g., chemotherapy, radiotherapy or surgery, has decreased or eliminated the colon cancer. The monitoring may determine if there has been a reoccurrence and, if so, determine its nature. The method comprises identifying a human patient that one wants to monitor for colon cancer, periodically analyzing cells, tissues or bodily fluids from such human patient for expression levels of one or more CSNAs or CSPs, and comparing the CSNA or CSP levels over time to those CSNA or CSP expression levels obtained previously. Patients may also be monitored by measuring one or more structural alterations in a CSNA or CSP that are associated with colon cancer.

[0371] If increased expression of a CSNA or CSP is associated with metastasis, treatment failure, or conversion of a preneoplastic lesion to a cancerous lesion, then detecting an increase in the expression level of a CSNA or CSP indicates that the tumor is metastasizing, that treatment has failed or that the lesion is cancerous, respectively. One having ordinary skill in the art would recognize that if this were the case, then a decreased expression level would be indicative of no metastasis, effective therapy or failure to progress to a neoplastic lesion. If decreased expression of a CSNA or CSP is associated with metastasis, treatment failure, or conversion of a preneoplastic lesion to a cancerous lesion, then detecting a decrease in the expression level of a CSNA or CSP indicates that the tumor is metastasizing, that treatment has failed or that the lesion is cancerous, respectively. In a preferred embodiment, the levels of CSNAs or CSPs are determined from the same cell type, tissue or bodily fluid as prior patient samples. Monitoring a patient for onset of colon cancer metastasis is periodic and preferably is done on a quarterly basis, but may be done more or less frequently.

[0372] The methods described herein can further be utilized as prognostic assays to identify subjects having or at risk of developing a disease or disorder associated with increased or decreased expression levels of a CSNA and/or CSP. The present invention provides a method in which a test sample is obtained from a human patient and one or more CSNAs and/or CSPs are detected. The presence of higher (or lower) CSNA or CSP levels as compared to normal human controls is diagnostic for the human patient being at risk for developing cancer, particularly colon cancer. The effectiveness of therapeutic agents to decrease (or increase) expression or activity of one or more CSNAs and/or CSPs of the invention can also be monitored by analyzing levels of expression of the CSNAs and/or CSPs in a human patient in clinical trials or in in vitro screening assays such as in human cells. In this way, the gene expression pattern can serve as a marker, indicative of the physiological response of the human patient or cells, as the case may be, to the agent being tested.

[0373] Detection of Genetic Lesions or Mutations

[0374] The methods of the present invention can also be used to detect genetic lesions or mutations in a CSG, thereby determining if a human with the genetic lesion is susceptible to developing colon cancer or to determine what genetic lesions are responsible, or are partly responsible, for a person's existing colon cancer. Genetic lesions can be detected, for example, by ascertaining the existence of a deletion, insertion and/or substitution of one or more nucleotides from the CSGs of this invention, a chromosomal rearrangement of a CSG, an aberrant modification of a CSG (such as of the methylation pattern of the genomic DNA), or allelic loss of a CSG. Methods to detect such lesions in the CSG of this invention are known to those having ordinary skill in the art following the teachings of the specification.

Methods of Detecting Noncancerous Colon Diseases

[0375] The present invention also provides methods for determining the expression levels and/or structural alterations of one or more CSNAs and/or CSPs in a sample from a patient suspected of having or known to have a noncancerous colon disease. In general, the method comprises the steps of obtaining a sample from the patient, determining the expression level or structural alterations of a CSNA and/or CSP, comparing the expression level or structural alteration of the CSNA or CSP to a normal colon control, and then ascertaining whether the patient has a noncancerous colon disease. In general, if high expression relative to a control of a CSNA or CSP is indicative of a particular noncancerous colon disease, a diagnostic assay is considered positive if the level of expression of the CSNA or CSP is at least two times higher, and more preferably are at least five times higher, even more preferably at least ten times higher, than in preferably the same cells, tissues or bodily fluid of a normal human control. In contrast, if low expression relative to a control of a CSNA or CSP is indicative of a noncancerous colon disease, a diagnostic assay is considered positive if the level of expression of the CSNA or CSP is at least two times lower, more preferably are at least five times lower, even more preferably at least ten times lower than in preferably the same cells, tissues or bodily fluid of a normal human control. The normal human control may be from a different patient or from uninvolved tissue of the same patient.

[0376] One having ordinary skill in the art may determine whether a CSNA and/or CSP is associated with a particular noncancerous colon disease by obtaining colon tissue from a patient having a noncancerous colon disease of interest and determining which CSNAs and/or CSPs are expressed in the tissue at either a higher or a lower level than in normal colon tissue. In another embodiment, one may determine whether a CSNA or CSP exhibits structural alterations in a particular noncancerous colon disease state by obtaining colon tissue from a patient having a noncancerous colon disease of interest and determining the structural alterations in one or more CSNAs and/or CSPs relative to normal colon tissue.

Methods for Identifying Colon Tissue

[0377] In another aspect, the invention provides methods for identifying colon tissue. These methods are particularly useful in, e.g., forensic science, colon cell differentiation and development, and in tissue engineering.

[0378] In one embodiment, the invention provides a method for determining whether a sample is colon tissue or has colon tissue-like characteristics. The method comprises the steps of providing a sample suspected of comprising colon tissue or having colon tissue-like characteristics, determining whether the sample expresses one or more CSNAs and/or CSPs, and, if the sample expresses one or more CSNAs and/or CSPs, concluding that the sample comprises colon tissue. In a preferred embodiment, the CSNA encodes a polypeptide having an amino acid sequence selected from SEQ ID NO: 113-259, or a homolog, allelic variant or fragment thereof. In a more preferred embodiment, the CSNA has a nucleotide sequence selected from SEQ ID NO: 1-112, or a hybridizing nucleic acid, an allelic variant or a part thereof. Determining whether a sample expresses a CSNA can be accomplished by any method known in the art. Preferred methods include hybridization to microarrays, Northern blot hybridization, and quantitative or qualitative RT-PCR. In another preferred embodiment, the method can be practiced by determining whether a CSP is expressed. Determining whether a sample expresses a CSP can be accomplished by any method known in the art. Preferred methods include Western blot, ELISA, RIA and 2D PAGE. In one embodiment, the CSP has an amino acid sequence selected from SEQ ID NO: 113-259, or a homolog, allelic variant or fragment thereof. In another preferred embodiment, the expression of at least two CSNAs and/or CSPs is determined. In a more preferred embodiment, the expression of at least three, more preferably four and even more preferably five CSNAs and/or CSPs are determined.

[0379] In one embodiment, the method can be used to determine whether an unknown tissue is colon tissue. This is particularly useful in forensic science, in which small, damaged pieces of tissues that are not identifiable by microscopic or other means are recovered from a crime or accident scene. In another embodiment, the method can be used to determine whether a tissue is differentiating or developing into colon tissue. This is important in monitoring the effects of the addition of various agents to cell or tissue culture, e.g., in producing new colon tissue by tissue engineering. These agents include, e.g., growth and differentiation factors, extracellular matrix proteins and culture medium. Other factors that may be measured for effects on tissue development and differentiation include gene transfer into the cells or tissues, alterations in pH, aqueous:air interface and various other culture conditions.

Methods for Producing and Modifying Colon Tissue

[0380] In another aspect, the invention provides methods for producing engineered colon tissue or cells. In one embodiment, the method comprises the steps of providing cells, introducing a CSNA or a CSG into the cells, and growing the cells under conditions in which they exhibit one or more properties of colon tissue cells. In a preferred embodiment, the cells are pleuripotent. As is well known in the art, normal colon tissue comprises a large number of different cell types. Thus, in one embodiment, the engineered colon tissue or cells comprises one of these cell types. In another embodiment, the engineered colon tissue or cells comprises more than one colon cell type. Further, the culture conditions of the cells or tissue may require manipulation in order to achieve full differentiation and development of the colon cell tissue. Methods for manipulating culture conditions are well known in the art.

[0381] Nucleic acid molecules encoding one or more CSPs are introduced into cells, preferably pleuripotent cells. In a preferred embodiment, the nucleic acid molecules encode CSPs having amino acid sequences selected from SEQ ID NO: 113-259, or homologous proteins, analogs, allelic variants or fragments thereof. In a more preferred embodiment, the nucleic acid molecules have a nucleotide sequence selected from SEQ ID NO: 1-112, or hybridizing nucleic acids, allelic variants or parts thereof. In another highly preferred embodiment, a CSG is introduced into the cells. Expression vectors and methods of introducing nucleic acid molecules into cells are well known in the art and are described in detail, supra.

[0382] Artificial colon tissue may be used to treat patients who have lost some or all of their colon function.

Pharmaceutical Compositions

[0383] In another aspect, the invention provides pharmaceutical compositions comprising the nucleic acid molecules, polypeptides, fusion proteins, antibodies, antibody derivatives, antibody fragments, agonists, antagonists, or inhibitors of the present invention. In a preferred embodiment, the pharmaceutical composition comprises a CSNA or part thereof. In a more preferred embodiment, the CSNA has a nucleotide sequence selected from the group consisting of SEQ ID NO: 1-112, a nucleic acid that hybridizes thereto, an allelic variant thereof, or a nucleic acid that has substantial sequence identity thereto. In another preferred embodiment, the pharmaceutical composition comprises a CSP or fragment thereof. In a more preferred embodiment, the pharmaceutical composition comprises a CSP having an amino acid sequence that is selected from the group consisting of SEQ ID NO: 113-259, a polypeptide that is homologous thereto, a fusion protein comprising all or a portion of the polypeptide, or an analog or derivative thereof. In another preferred embodiment, the pharmaceutical composition comprises an anti-CSP antibody, preferably an antibody that specifically binds to a CSP having an amino acid that is selected from the group consisting of SEQ ID NO: 113-259, or an antibody that binds to a polypeptide that is homologous thereto, a fusion protein comprising all or a portion of the polypeptide, or an analog or derivative thereof.

[0384] Due to the association of angiogenesis with cancer vascularization there is great need of new markers and methods for diagnosing angiogenesis activity to identify developing tumors and angiogenesis related diseases. Furthermore, great need is also present for new molecular targets useful in the treatment of angiogenesis and angiogenesis related diseases such as cancer. In addition known modulators of angiogenesis such as endostatin or vascular endothelial growth factor (VEGF). Use of the methods and compositions disclosed herein in combination with anti-angiogenesis drugs, drugs that block the matrix breakdown (such as BMS-275291, Dalteparin (Fragmin®), Suramin), drugs that inhibit endothelial cells (2-methoxyestradiol (2-ME), CC-5013 (Thalidomide Analog), Combretastatin A4 Phosphate, LY317615 (Protein Kinase C Beta Inhibitor), Soy Isoflavone (Genistein; Soy Protein Isolate), Thalidomide), drugs that block activators of angiogenesis (AE-941 (Neovastat™; GW786034), Anti-VEGF Antibody (Bevacizumab; Avastin™), Interferon-alpha, PTK787/ZK 222584, VEGF-Trap, ZD6474), Drugs that inhibit endothelial-specific integrin/survival signaling (EMD 121974, Anti-Anb3 Integrin Antibody (Medi-522; Vitaxin™)).

[0385] Such a composition typically contains from about 0.1 to 90% by weight of a therapeutic agent of the invention formulated in and/or with a pharmaceutically acceptable carrier or excipient.

[0386] Pharmaceutical formulation is a well-established art that is further described in Gennaro (ed.), Remington: The Science and Practice of Pharmacy, 20^{th} ed., Lippincott, Williams & Wilkins (2000); Ansel et al., Pharmaceutical Dosage Forms and Drug Delivery Systems, 7^{th} ed., Lippincott Williams & Wilkins (1999); and Kibbe (ed.), Handbook of Pharmaceutical Excipients American Pharmaceutical Association, 3^{rd} ed. (2000) and thus need not be described in detail herein.

[0387] Briefly, formulation of the pharmaceutical compositions of the present invention will depend upon the route chosen for administration. The pharmaceutical compositions utilized in this invention can be administered by various routes including both enteral and parenteral routes, including oral, intravenous, intramuscular, subcutaneous, inhalation, topical, sublingual, rectal, intra-arterial, intramedullary, intrathecal, intraventricular, transmucosal, transdermal, intranasal, intraperitoneal, intrapulmonary, and intrauterine.

[0388] Oral dosage forms can be formulated as tablets, pills, dragees, capsules, liquids, gels, syrups, slurries, suspensions, and the like, for ingestion by the patient.

[0389] Solid formulations of the compositions for oral administration can contain suitable carriers or excipients, such as carbohydrate or protein fillers, such as sugars, including lactose, sucrose, mannitol, or sorbitol; starch from corn, wheat, rice, potato, or other plants; cellulose, such as methyl cellulose, hydroxypropylmethyl-cellulose, sodium carboxymethylcellulose, or microcrystalline cellulose; gums including arabic and tragacanth; proteins such as gelatin and collagen; inorganics, such as kaolin, calcium carbonate, dicalcium phosphate, sodium chloride; and other agents such as acacia and alginic acid.

[0390] Agents that facilitate disintegration and/or solubilization can be added, such as the cross-linked polyvinyl pyrrolidone, agar, alginic acid, or a salt thereof, such as sodium alginate, microcrystalline cellulose, cornstarch, sodium starch glycolate, and alginic acid.

[0391] Tablet binders that can be used include acacia, methylcellulose, sodium carboxymethylcellulose, polyvinylpyrrolidone (Povidone™), hydroxypropyl methylcellulose, sucrose, starch and ethylcellulose.

[0392] Lubricants that can be used include magnesium stearates, stearic acid, silicone fluid, talc, waxes, oils, and colloidal silica.

[0393] Fillers, agents that facilitate disintegration and/or solubilization, tablet binders and lubricants, including the aforementioned, can be used singly or in combination.

[0394] Solid oral dosage forms need not be uniform throughout. For example, dragee cores can be used in conjunction with suitable coatings, such as concentrated sugar solutions, which can also contain gum arabic, talc, polyvinylpyrrolidone, carbopol gel, polyethylene glycol, and/or titanium dioxide, lacquer solutions, and suitable organic solvents or solvent mixtures.

[0395] Oral dosage forms of the present invention include push-fit capsules made of gelatin, as well as soft, sealed capsules made of gelatin and a coating, such as glycerol or sorbitol. Push-fit capsules can contain active ingredients mixed with a filler or binders, such as lactose or starches, lubricants, such as talc or magnesium stearate, and, optionally, stabilizers. In soft capsules, the active compounds can be dissolved or suspended in suitable liquids, such as fatty oils, liquid, or liquid polyethylene glycol with or without stabilizers.

[0396] Additionally, dyestuffs or pigments can be added to the tablets or dragee coatings for product identification or to characterize the quantity of active compound, i.e., dosage.

[0397] Liquid formulations of the pharmaceutical compositions for oral (enteral) administration are prepared in water or other aqueous vehicles and can contain various suspending agents such as methylcellulose, alginates, tragacanth, pectin, kelgin, carrageenan, acacia, polyvinylpyrrolidone, and polyvinyl alcohol. The liquid formulations can also include solutions, emulsions, syrups and elixirs containing, together with the active compound(s), wetting agents, sweeteners, and coloring and flavoring agents.

[0398] The pharmaceutical compositions of the present invention can also be formulated for parenteral administration. Formulations for parenteral administration can be in the form of aqueous or non-aqueous isotonic sterile injection solutions or suspensions.

[0399] For intravenous injection, water soluble versions of the compounds of the present invention are formulated in, or if provided as a lyophilate, mixed with, a physiologically acceptable fluid vehicle, such as 5% dextrose (“D5”), physiologically buffered saline, 0.9% saline, Hanks' solution, or Ringer's solution. Intravenous formulations may include carriers, excipients or stabilizers including, without limitation, calcium, human serum albumin, citrate, acetate, calcium chloride, carbonate, and other salts.

[0400] Intramuscular preparations, e.g. a sterile formulation of a suitable soluble salt form of the compounds of the present invention, can be dissolved and administered in a pharmaceutical excipient such as Water-for-Injection, 0.9% saline, or 5% glucose solution. Alternatively, a suitable insoluble form of the compound can be prepared and administered as a suspension in an aqueous base or a pharmaceutically acceptable oil base, such as an ester of a long chain fatty acid (e.g., ethyl oleate), fatty oils such as sesame oil, triglycerides, or liposomes.

[0401] Parenteral formulations of the compositions can contain various carriers such as vegetable oils; dimethylacetamide, dimethylformamide, ethyl lactate, ethyl carbonate, isopropyl myristate, ethanol, polyols (glycerol, propylene glycol, liquid polyethylene glycol, and the like).

[0402] Aqueous injection suspensions can also contain substances that increase the viscosity of the suspension, such as sodium carboxymethyl cellulose, sorbitol, or dextran. Non-lipid polycationic amino polymers can also be used for delivery. Optionally, the suspension can also contain suitable stabilizers or agents that increase the solubility of the compounds to allow for the preparation of highly concentrated solutions.

[0403] Pharmaceutical compositions of the present invention can also be formulated to permit injectable, long-term, deposition. Injectable depot forms may be made by forming microencapsulated matrices of the compound in biodegradable polymers such as polylactide-polyglycolide. Depending upon the ratio of drug to polymer and the nature of the particular polymer employed, the rate of drug release can be controlled. Examples of other biodegradable polymers include poly(orthoesters) and poly(anhydrides). Depot injectable formulations are also prepared by entrapping the drug in microemulsions that are compatible with body tissues.

[0404] The pharmaceutical compositions of the present invention can be administered topically. For topical use the compounds of the present invention can also be prepared in suitable forms to be applied to the skin, or mucus membranes of the nose and throat, and can take the form of lotions, creams, ointments, liquid sprays or inhalants, drops, tinctures, lozenges, or throat paints. Such topical formulations further can include chemical compounds such as dimethylsulfoxide (DMSO) to facilitate surface penetration of the active ingredient. In other transdermal formulations, typically in patch-delivered formulations, the pharmaceutically active compound is formulated with one or more skin penetrants, such as 2-N-methyl-pyrrolidone (NMP) or zone. A topical semi-solid ointment formulation typically contains a concentration of the active ingredient from about 1 to 20%, e.g., 5 to 10%, in a carrier such as a pharmaceutical cream base.

[0405] For application to the eyes or ears, the compounds of the present invention can be presented in liquid or semi-liquid form formulated in hydrophobic or hydrophilic bases as ointments, creams, lotions, paints or powders.

[0406] For rectal administration the compounds of the present invention can be administered in the form of suppositories admixed with conventional carriers such as cocoa butter, wax or other glyceride.

[0407] Inhalation formulations can also readily be formulated. For inhalation, various powder and liquid formulations can be prepared. For aerosol preparations, a sterile formulation of the compound or salt form of the compound may be used in inhalers, such as metered dose inhalers, and nebulizers. Aerosolized forms may be especially useful for treating respiratory disorders.

[0408] Alternatively, the compounds of the present invention can be in powder form for reconstitution in the appropriate pharmaceutically acceptable carrier at the time of delivery.

[0409] The pharmaceutically active compound in the pharmaceutical compositions of the present invention can be provided as the salt of a variety of acids, including but not limited to hydrochloric, sulfuric, acetic, lactic, tartaric, malic, and succinic acid. Salts tend to be more soluble in aqueous or other protonic solvents than are the corresponding free base forms.

[0410] After pharmaceutical compositions have been prepared, they are packaged in an appropriate container and labeled for treatment of an indicated condition.

[0411] The active compound will be present in an amount effective to achieve the intended purpose. The determination of an effective dose is well within the capability of those skilled in the art.

[0412] A “therapeutically effective dose” refers to that amount of active ingredient, for example CSP polypeptide, fusion protein, or fragments thereof, antibodies specific for CSP, agonists, antagonists or inhibitors of CSP, which ameliorates the signs or symptoms of the disease or prevent progression thereof; as would be understood in the medical arts, cure, although desired, is not required.

[0413] The therapeutically effective dose of the pharmaceutical agents of the present invention can be estimated initially by in vitro tests, such as cell culture assays, followed by assay in model animals, usually mice, rats, rabbits, dogs, or pigs. The animal model can also be used to determine an initial preferred concentration range and route of administration.

[0414] For example, the ED50 (the dose therapeutically effective in 50% of the population) and LD50 (the dose lethal to 50% of the population) can be determined in one or more cell culture of animal model systems. The dose ratio of toxic to therapeutic effects is the therapeutic index, which can be expressed as LD50/ED50. Pharmaceutical compositions that exhibit large therapeutic indices are preferred.

[0415] The data obtained from cell culture assays and animal studies are used in formulating an initial dosage range for human use, and preferably provide a range of circulating concentrations that includes the ED50 with little or no toxicity. After administration, or between successive administrations, the circulating concentration of active agent varies within this range depending upon pharmacokinetic factors well known in the art, such as the dosage form employed, sensitivity of the patient, and the route of administration.

[0416] The exact dosage will be determined by the practitioner, in light of factors specific to the subject requiring treatment. Factors that can be taken into account by the practitioner include the severity of the disease state, general health of the subject, age, weight, gender of the subject, diet, time and frequency of administration, drug combination(s), reaction sensitivities, and tolerance/response to therapy. Long-acting pharmaceutical compositions can be administered every 3 to 4 days, every week, or once every two weeks depending on half-life and clearance rate of the particular formulation.

[0417] Normal dosage amounts may vary from 0.1 to 100,000 micrograms, up to a total dose of about 1 g, depending upon the route of administration. Where the therapeutic agent is a protein or antibody of the present invention, the therapeutic protein or antibody agent typically is administered at a daily dosage of 0.01 mg to 30 mg/kg of body weight of the patient (e.g., 1 mg/kg to 5 mg/kg). The pharmaceutical formulation can be administered in multiple doses per day, if desired, to achieve the total desired daily dose.

[0418] Guidance as to particular dosages and methods of delivery is provided in the literature and generally available to practitioners in the art. Those skilled in the art will employ different formulations for nucleotides than for proteins or their inhibitors. Similarly, delivery of polynucleotides or polypeptides will be specific to particular cells, conditions, locations, etc.

[0419] Conventional methods, known to those of ordinary skill in the art of medicine, can be used to administer the pharmaceutical formulation(s) of the present invention to the patient. The pharmaceutical compositions of the present invention can be administered alone, or in combination with other therapeutic agents or interventions.

Therapeutic Methods

[0420] The present invention further provides methods of treating subjects having defects in a gene of the invention, e.g., in expression, activity, distribution, localization, and/or solubility, which can manifest as a disorder of colon function. As used herein, “treating” includes all medically-acceptable types of therapeutic intervention, including palliation and prophylaxis (prevention) of disease. The term “treating” encompasses any improvement of a disease, including minor improvements. These methods are discussed below.

[0421] Gene Therapy and Vaccines

[0422] The isolated nucleic acids of the present invention can also be used to drive in vivo expression of the polypeptides of the present invention. In vivo expression can be driven from a vector, typically a viral vector, often a vector based upon a replication incompetent retrovirus, an adenovirus, or an adeno-associated virus (AAV), for the purpose of gene therapy. In vivo expression can also be driven from signals endogenous to the nucleic acid or from a vector, often a plasmid vector, such as pVAX1 (Invitrogen, Carlsbad, Calif., USA), for purpose of “naked” nucleic acid vaccination, as further described in U.S. Pat. Nos. 5,589,466; 5,679,647; 5,804,566; 5,830,877; 5,843,913; 5,880,104; 5,958,891; 5,985,847; 6,017,897; 6,110,898; 6,204,250, the disclosures of which are incorporated herein by reference in their entireties. For cancer therapy, it is preferred that the vector also be tumor-selective. See, e.g., Doronin et al., J. Virol. 75: 3314-24 (2001).

[0423] In another embodiment of the therapeutic methods of the present invention, a therapeutically effective amount of a pharmaceutical composition comprising a nucleic acid molecule of the present invention is administered. The nucleic acid molecule can be delivered in a vector that drives expression of a CSP, fusion protein, or fragment thereof, or without such vector. Nucleic acid compositions that can drive expression of a CSP are administered, for example, to complement a deficiency in the native CSP, or as DNA vaccines. Expression vectors derived from virus, replication deficient retroviruses, adenovirus, adeno-associated (AAV) virus, herpes virus, or vaccinia virus can be used as can plasmids. See, e.g., Cid-Arregui, supra. In a preferred embodiment, the nucleic acid molecule encodes a CSP having the amino acid sequence of SEQ ID NO: 113-259, or a fragment, fusion protein, allelic variant or homolog thereof.

[0424] In still other therapeutic methods of the present invention, pharmaceutical compositions comprising host cells that express a CSP, fusions, or fragments thereof can be administered. In such cases, the cells are typically autologous, so as to circumvent xenogeneic or allotypic rejection, and are administered to complement defects in CSP production or activity. In a preferred embodiment, the nucleic acid molecules in the cells encode a CSP having the amino acid sequence of SEQ ID NO: 113-259, or a fragment, fusion protein, allelic variant or homolog thereof.

[0425] Antisense Administration

[0426] Antisense nucleic acid compositions, or vectors that drive expression of a CSG antisense nucleic acid, are administered to downregulate transcription and/or translation of a CSG in circumstances in which excessive production, or production of aberrant protein, is the pathophysiologic basis of disease.

[0427] Antisense compositions useful in therapy can have a sequence that is complementary to coding or to noncoding regions of a CSG. For example, oligonucleotides derived from the transcription initiation site, e.g. between positions −10 and +10 from the start site, are preferred.

[0428] Catalytic antisense compositions, such as ribozymes, that are capable of sequence-specific hybridization to CSG transcripts, are also useful in therapy. See, e.g., Phylactou, Adv. Drug Deliv. Rev. 44(2-3): 97-108 (2000); Phylactou et al., Hum. Mol. Genet. 7(10): 1649-53 (1998); Rossi, Ciba Found. Symp. 209: 195-204 (1997); and Sigurdsson et al., Trends Biotechnol. 13(8): 286-9 (1995).

[0429] Other nucleic acids useful in the therapeutic methods of the present invention are those that are capable of triplex helix formation in or near the CSG genomic locus. Such triplexing oligonucleotides are able to inhibit transcription. See, e.g., Intody et al., Nucleic Acids Res. 28(21): 4283-90 (2000); and McGuffie et al., Cancer Res. 60(14): 3790-9 (2000). Pharmaceutical compositions comprising such triplex forming oligos (TFOs) are administered in circumstances in which excessive production, or production of aberrant protein, is a pathophysiologic basis of disease.

[0430] In a preferred embodiment, the antisense molecule is derived from a nucleic acid molecule encoding a CSP, preferably a CSP comprising an amino acid sequence of SEQ ID NO: 113-259, or a fragment, allelic variant or homolog thereof. In a more preferred embodiment, the antisense molecule is derived from a nucleic acid molecule having a nucleotide sequence of SEQ ID NO: 1-112, or a part, allelic variant, substantially similar or hybridizing nucleic acid thereof.

[0431] Polypeptide Administration

[0432] In one embodiment of the therapeutic methods of the present invention, a therapeutically effective amount of a pharmaceutical composition comprising a CSP, a fusion protein, fragment, analog or derivative thereof is administered to a subject with a clinically-significant CSP defect.

[0433] Protein compositions are administered, for example, to complement a deficiency in native CSP. In other embodiments, protein compositions are administered as a vaccine to elicit a humoral and/or cellular immune response to CSP. The immune response can be used to modulate activity of CSP or, depending on the immunogen, to immunize against aberrant or aberrantly expressed forms, such as mutant or inappropriately expressed isoforms. In yet other embodiments, protein fusions having a toxic moiety are administered to ablate cells that aberrantly accumulate CSP.

[0434] In a preferred embodiment, the polypeptide administered is a CSP comprising an amino acid sequence of SEQ ID NO: 113-259, or a fusion protein, allelic variant, homolog, analog or derivative thereof. In a more preferred embodiment, the polypeptide is encoded by a nucleic acid molecule having a nucleotide sequence of SEQ ID NO: 1-112, or a part, allelic variant, substantially similar or hybridizing nucleic acid thereof.

[0435] Antibody, Agonist and Antagonist Administration

[0436] In another embodiment of the therapeutic methods of the present invention, a therapeutically effective amount of a pharmaceutical composition comprising an antibody (including fragment or derivative thereof) of the present invention is administered. As is well known, antibody compositions are administered, for example, to antagonize activity of CSP, or to target therapeutic agents to sites of CSP presence and/or accumulation. In a preferred embodiment, the antibody specifically binds to a CSP comprising an amino acid sequence of SEQ ID NO: 113-259, or a fusion protein, allelic variant, homolog, analog or derivative thereof. In a more preferred embodiment, the antibody specifically binds to a CSP encoded by a nucleic acid molecule having a nucleotide sequence of SEQ ID NO: 1-112, or a part, allelic variant, substantially similar or hybridizing nucleic acid thereof.

[0437] The present invention also provides methods for identifying modulators which bind to a CSP or have a modulatory effect on the expression or activity of a CSP. Modulators which decrease the expression or activity of CSP (antagonists) are believed to be useful in treating colon cancer. Such screening assays are known to those of skill in the art and include, without limitation, cell-based assays and cell-free assays. Small molecules predicted via computer imaging to specifically bind to regions of a CSP can also be designed, synthesized and tested for use in the imaging and treatment of colon cancer. Further, libraries of molecules can be screened for potential anticancer agents by assessing the ability of the molecule to bind to the CSPs identified herein. Molecules identified in the library as being capable of binding to a CSP are key candidates for further evaluation for use in the treatment of colon cancer. In a preferred embodiment, these molecules will downregulate expression and/or activity of a CSP in cells.

[0438] In another embodiment of the therapeutic methods of the present invention, a pharmaceutical composition comprising a non-antibody antagonist of CSP is administered. Antagonists of CSP can be produced using methods generally known in the art. In particular, purified CSP can be used to screen libraries of pharmaceutical agents, often combinatorial libraries of small molecules, to identify those that specifically bind and antagonize at least one activity of a CSP.

[0439] In other embodiments a pharmaceutical composition comprising an agonist of a CSP is administered. Agonists can be identified using methods analogous to those used to identify antagonists.

[0440] In a preferred embodiment, the antagonist or agonist specifically binds to and antagonizes or agonizes, respectively, a CSP comprising an amino acid sequence of SEQ ID NO: 113-259, or a fusion protein, allelic variant, homolog, analog or derivative thereof. In a more preferred embodiment, the antagonist or agonist specifically binds to and antagonizes or agonizes, respectively, a CSP encoded by a nucleic acid molecule having a nucleotide sequence of SEQ ID NO: 1-112, or a part, allelic variant, substantially similar or hybridizing nucleic acid thereof.

[0441] Targeting Colons Tissue

[0442] The invention also provides a method in which a polypeptide of the invention, or an antibody thereto, is linked to a therapeutic agent such that it can be delivered to the colon or to specific cells in the colon. In a preferred embodiment, an anti-CSP antibody is linked to a therapeutic agent and is administered to a patient in need of such therapeutic agent. The therapeutic agent may be a toxin, if colon tissue needs to be selectively destroyed. This would be useful for targeting and killing colon cancer cells. In another embodiment, the therapeutic agent may be a growth or differentiation factor, which would be useful for promoting colon cell function.

[0443] In another embodiment, an anti-CSP antibody may be linked to an imaging agent that can be detected using, e.g., magnetic resonance imaging, CT or PET. This would be useful for determining and monitoring colon function, identifying colon cancer tumors, and identifying noncancerous colon diseases.

### EXAMPLES

### Example 1a

### Alternative Splice Variants

[0444] We identified gene transcripts using the Gencarta™ tools (Compugen Ltd., Tel Aviv, Israel) and a variety of public and proprietary databases. These splice variants are either sequences which differ from a previously defined sequence or new uses of known sequences. In general related variants are annotated as DEX0449_XXX.nt.1, DEX0449_XXX.nt.2, DEX0449_XXX.nt.3, etc. The variant DNA sequences encode proteins which differ from a previously defined protein sequence. In relation to the nucleotide sequence naming convention, protein variants are annotated as DEX0449_XXX.aa.1, DEX0449_XXX.aa.2, etc., wherein transcript DEX0449_XXX.nt.1 encodes protein DEX0449_XXX.aa.1. A single transcript may encode a protein from an alternate Open Reading Fram (ORF) which is designated DEX0449_XXX.orf.1. Additionally, multiple transcripts may encode for a single protein. In this case, DEX0449_XXX.nt.1 and DEX0449_XXX.nt.2 will both be associated with DEX0449_XXX.aa.1.

[0445] The mapping of the nucleic acid (“NT”) SEQ ID NO; DEX ID; chromosomal location (if known); open reading frame (ORF) location; amino acid (“AA”) SEQ ID NO; AA DEX ID; are shown in the table below.

| SEQ | | | | SEQ | |
|---|---|---|---|---|---|
| ID | | | | ID | |
| NO | DEX ID | Chromo Map | ORF Loc | NO | DEX ID |
| 1 | DEX0449_001.nt.1 | 17q25.3 | 1-498 | 113 | DEX0449_001.aa.1 |
| 1 | DEX0449_001.nt.1 | 17q25.3 | 2-493 | 114 | DEX0449_001.orf.1 |
| 2 | DEX0449_002.nt.1 | 5q13.1 | 253-1022 | 115 | DEX0449_002.aa.1 |
| 2 | DEX0449_002.nt.1 | 5q13.1 | 128-877 | 116 | DEX0449_002.orf.1 |
| 3 | DEX0449_003.nt.1 | 17q25.1 | 9-1226 | 117 | DEX0449_003.aa.1 |
| 4 | DEX0449_003.nt.2 | 17q25.1 | 7-1229 | 117 | DEX0449_003.aa.1 |
| 5 | DEX0449_003.nt.3 | 17q25.1 | 9-1583 | 118 | DEX0449_003.aa.3 |
| 6 | DEX0449_003.nt.4 | 17q25.1 | 2373-3357 | 119 | DEX0449_003.aa.4 |
| 6 | DEX0449_003.nt.4 | 17q25.1 | 2207-3358 | 120 | DEX0449_003.orf.4 |
| 7 | DEX0449_003.nt.5 | 17q25.1 | 7-1229 | 117 | DEX0449_003.aa.1 |
| 8 | DEX0449_003.nt.6 | 17q25.1 | 7-1229 | 117 | DEX0449_003.aa.1 |
| 8 | DEX0449_003.nt.6 | 17q25.1 | 2490-3839 | 121 | DEX0449_003.orf.6 |
| 9 | DEX0449_003.nt.7 | 17q25.1 | 9-914 | 122 | DEX0449_003.aa.7 |
| 10 | DEX0449_004.nt.1 | 4q32.3 | 237-722 | 123 | DEX0449_004.aa.1 |
| 11 | DEX0449_005.nt.1 | 8q24.3 | 181-802 | 124 | DEX0449_005.aa.1 |
| 11 | DEX0449_005.nt.1 | 8q24.3 | 3-1142 | 125 | DEX0449_005.orf.1 |
| 12 | DEX0449_005.nt.2 | 8q24.3 | 181-802 | 124 | DEX0449_005.aa.1 |
| 12 | DEX0449_005.nt.2 | 8q24.3 | 3-1142 | 126 | DEX0449_005.orf.2 |
| 13 | DEX0449_005.nt.3 | 8q24.3 | 329-1235 | 127 | DEX0449_005.aa.3 |
| 13 | DEX0449_005.nt.3 | 8q24.3 | 594-1574 | 128 | DEX0449_005.orf.3 |
| 14 | DEX0449_005.nt.4 | 8q24.3 | 180-662 | 129 | DEX0449_005.aa.4 |
| 15 | DEX0449_005.nt.5 | 8q24.3 | 181-667 | 129 | DEX0449_005.aa.4 |
| 16 | DEX0449_005.nt.6 | 8q24.3 | 181-802 | 124 | DEX0449_005.aa.1 |
| 16 | DEX0449_005.nt.6 | 8q24.3 | 3-980 | 130 | DEX0449_005.orf.6 |
| 17 | DEX0449_006.nt.1 | 14q32.33 | 1774-2421 | 131 | DEX0449_006.aa.1 |
| 18 | DEX0449_007.nt.1 | 4q13.3 | 103-431 | 132 | DEX0449_007.aa.1 |
| 18 | DEX0449_007.nt.1 | 4q13.3 | 2-427 | 133 | DEX0449_007.orf.1 |
| 19 | DEX0449_008.nt.1 | 4q21.1 | 232-1681 | 134 | DEX0449_008.aa.1 |
| 19 | DEX0449_008.nt.1 | 4q21.1 | 504-1679 | 135 | DEX0449_008.orf.1 |
| 20 | DEX0449_009.nt.1 | 4q21.1 | 1-951 | 136 | DEX0449_009.aa.1 |
| 20 | DEX0449_009.nt.1 | 4q21.1 | 3-944 | 137 | DEX0449_009.orf.1 |
| 21 | DEX0449_009.nt.2 | 4q21.1 | 48-554 | 138 | DEX0449_009.aa.2 |
| 22 | DEX0449_010.nt.1 | 15q25.3 | 117-561 | 139 | DEX0449_010.aa.1 |
| 22 | DEX0449_010.nt.1 | 15q25.3 | 61-558 | 140 | DEX0449_010.orf.1 |
| 23 | DEX0449_011.nt.1 | 8q11.23 | 868-1633 | 141 | DEX0449_011.aa.1 |
| 23 | DEX0449_011.nt.1 | 8q11.23 | 723-1628 | 142 | DEX0449_011.orf.1 |
| 24 | DEX0449_012.nt.1 | 7p11.2 | 733-1407 | 143 | DEX0449_012.aa.1 |
| 25 | DEX0449_012.nt.2 | 7p11.2 | 918-1596 | 143 | DEX0449_012.aa.1 |
| 26 | DEX0449_012.nt.3 | 7p11.2 | 733-1411 | 143 | DEX0449_012.aa.1 |
| 27 | DEX0449_013.nt.1 | 8p21.2 | 66-812 | 144 | DEX0449_013.aa.1 |
| 28 | DEX0449_014.nt.1 | 18p11.31 | 880-1218 | 145 | DEX0449_014.aa.1 |
| 29 | DEX0449_015.nt.1 | 20q13.2 | 422-727 | 146 | DEX0449_015.aa.1 |
| 30 | DEX0449_016.nt.1 | 7p22.3 | 394-1633 | 147 | DEX0449_016.aa.1 |
| 30 | DEX0449_016.nt.1 | 7p22.3 | 1019-1627 | 148 | DEX0449_016.orf.1 |
| 31 | DEX0449_017.nt.1 | 17p13.3 | 295-642 | 149 | DEX0449_017.aa.1 |
| 31 | DEX0449_017.nt.1 | 17p13.3 | 138-560 | 150 | DEX0449_017.orf.1 |
| 32 | DEX0449_018.nt.1 | 2q35 | 133-1414 | 151 | DEX0449_018.aa.1 |
| 33 | DEX0449_018.nt.2 | 2q35 | 133-1414 | 151 | DEX0449_018.aa.1 |
| 34 | DEX0449_018.nt.3 | 2q35 | 133-1414 | 151 | DEX0449_018.aa.1 |
| 35 | DEX0449_018.nt.4 | 2q35 | 134-1243 | 152 | DEX0449_018.aa.4 |
| 36 | DEX0449_018.nt.5 | 2q35 | 134-757 | 153 | DEX0449_018.aa.5 |
| 37 | DEX0449_018.nt.6 | 2q35 | 133-1414 | 151 | DEX0449_018.aa.1 |
| 38 | DEX0449_018.nt.7 | 2q35 | 2635-3261 | 154 | DEX0449_018.orf.7 |
| 38 | DEX0449_018.nt.7 | 2q35 | 133-511 | 155 | DEX0449_018.aa.7 |
| 39 | DEX0449_018.nt.8 | 2q35 | 134-1411 | 151 | DEX0449_018.aa.1 |
| 40 | DEX0449_019.nt.1 | 9 | 2070-2642 | 156 | DEX0449_019.orf.1 |
| 40 | DEX0449_019.nt.1 | 9 | 1311-1704 | 157 | DEX0449_019.aa.1 |
| 41 | DEX0449_020.nt.1 | 19q13.41 | 266-1285 | 158 | DEX0449_020.orf.1 |
| 41 | DEX0449_020.nt.1 | 19q13.41 | 364-1286 | 159 | DEX0449_020.aa.1 |
| 42 | DEX0449_020.nt.2 | 19q13.41 | 3-1457 | 160 | DEX0449_020.orf.2 |
| 42 | DEX0449_020.nt.2 | 19q13.41 | 280-1679 | 161 | DEX0449_020.aa.2 |
| 43 | DEX0449_021.nt.1 | 1q32.1 | 183-404 | 162 | DEX0449_021.orf.1 |
| 43 | DEX0449_021.nt.1 | 1q32.1 | 1-193 | 163 | DEX0449_021.aa.1 |
| 44 | DEX0449_022.nt.1 | 17q25.3 | 612-1550 | 164 | DEX0449_022.aa.1 |
| 45 | DEX0449_022.nt.2 | 17q25.3 | 72-1256 | 165 | DEX0449_022.orf.2 |
| 45 | DEX0449_022.nt.2 | 17q25.3 | 2750-3608 | 166 | DEX0449_022.aa.2 |
| 46 | DEX0449_023.nt.1 | 16p13.2 | 1330-1839 | 167 | DEX0449_023.orf.1 |
| 46 | DEX0449_023.nt.1 | 16p13.2 | 1362-1840 | 168 | DEX0449_023.aa.1 |
| 47 | DEX0449_023.nt.2 | 16p13.2 | 1108-1617 | 169 | DEX0449_023.orf.2 |
| 47 | DEX0449_023.nt.2 | 16p13.2 | 1140-1618 | 168 | DEX0449_023.aa.1 |
| 48 | DEX0449_024.nt.1 | 16p13.2 | 502-1266 | 170 | DEX0449_024.orf.1 |
| 48 | DEX0449_024.nt.1 | 16p13.2 | 590-1034 | 171 | DEX0449_024.aa.1 |
| 49 | DEX0449_024.nt.2 | 16p13.2 | 264-1028 | 172 | DEX0449_024.orf.2 |
| 49 | DEX0449_024.nt.2 | 16p13.2 | 352-796 | 171 | DEX0449_024.aa.1 |
| 50 | DEX0449_024.nt.3 | 16p13.2 | 2-730 | 173 | DEX0449_024.orf.3 |
| 50 | DEX0449_024.nt.3 | 16p13.2 | 55-498 | 174 | DEX0449_024.aa.3 |
| 51 | DEX0449_024.nt.4 | 16p13.2 | 948-1553 | 175 | DEX0449_024.orf.4 |
| 51 | DEX0449_024.nt.4 | 16p13.2 | 1104-1521 | 176 | DEX0449_024.aa.4 |
| 52 | DEX0449_024.nt.5 | 16p13.2 | 232-789 | 177 | DEX0449_024.aa.5 |
| 52 | DEX0449_024.nt.5 | 16p13.2 | 30-824 | 178 | DEX0449_024.orf.5 |
| 53 | DEX0449_024.nt.6 | 16p13.2 | 606-1208 | 179 | DEX0449_024.aa.6 |
| 54 | DEX0449_025.nt.1 | 3q25.32 | 93-569 | 180 | DEX0449_025.aa.1 |
| 55 | DEX0449_025.nt.2 | 3q25.32 | 454-837 | 181 | DEX0449_025.aa.2 |
| 56 | DEX0449_026.nt.1 | 5q35.1 | 90-761 | 182 | DEX0449_026.aa.1 |
| 57 | DEX0449_026.nt.2 | 5q35.1 | 1108-1801 | 183 | DEX0449_026.aa.2 |
| 57 | DEX0449_026.nt.2 | 5q35.1 | 1123-1797 | 184 | DEX0449_026.orf.2 |
| 58 | DEX0449_027.nt.1 | 19p13.3 | 157-3416 | 185 | DEX0449_027.aa.1 |
| 58 | DEX0449_027.nt.1 | 19p13.3 | 3-2006 | 186 | DEX0449_027.orf.1 |
| 59 | DEX0449_027.nt.2 | 19p13.3 | 231-2543 | 187 | DEX0449_027.aa.2 |
| 60 | DEX0449_027.nt.3 | 19p13.3 | 159-2702 | 188 | DEX0449_027.aa.3 |
| 61 | DEX0449_028.nt.1 | 8q13.2 | 152-523 | 189 | DEX0449_028.aa.1 |
| 62 | DEX0449_029.nt.1 | 1q21.3 | 187-1074 | 190 | DEX0449_029.aa.1 |
| 63 | DEX0449_030.nt.1 | 20q11.23 | 1-589 | 191 | DEX0449_030.aa.1 |
| 63 | DEX0449_030.nt.1 | 20q11.23 | 3-584 | 192 | DEX0449_030.orf.1 |
| 64 | DEX0449_031.nt.1 | 20q13.33 | 1827-2226 | 193 | DEX0449_031.aa.1 |
| 64 | DEX0449_031.nt.1 | 20q13.33 | 1602-2198 | 194 | DEX0449_031.orf.1 |
| 65 | DEX0449_032.nt.1 | 11q11 | 133-913 | 195 | DEX0449_032.aa.1 |
| 66 | DEX0449_032.nt.2 | 11q11 | 252-723 | 196 | DEX0449_032.aa.2 |
| 66 | DEX0449_032.nt.2 | 11q11 | 212-715 | 197 | DEX0449_032.orf.2 |
| 67 | DEX0449_032.nt.3 | 11q11 | 134-544 | 198 | DEX0449_032.aa.3 |
| 68 | DEX0449_032.nt.4 | 11q11 | 97-810 | 199 | DEX0449_032.aa.4 |
| 68 | DEX0449_032.nt.4 | 11q11 | 341-808 | 200 | DEX0449_032.orf.4 |
| 69 | DEX0449_033.nt.1 | 22q13.31 | 303-566 | 201 | DEX0449_033.aa.1 |
| 70 | DEX0449_033.nt.2 | 22q13.31 | 43-166 | 202 | DEX0449_033.aa.2 |
| 70 | DEX0449_033.nt.2 | 22q13.31 | 33-212 | 203 | DEX0449_033.orf.2 |
| 71 | DEX0449_034.nt.1 | 19p13.2 | 34-672 | 204 | DEX0449_034.aa.1 |
| 72 | DEX0449_035.nt.1 | 3q13.11 | 1-1378 | 205 | DEX0449_035.aa.1 |
| 72 | DEX0449_035.nt.1 | 3q13.11 | 60-1376 | 206 | DEX0449_035.orf.1 |
| 73 | DEX0449_036.nt.1 | 1q42.12 | 79-473 | 207 | DEX0449_036.aa.1 |
| 73 | DEX0449_036.nt.1 | 1q42.12 | 17-745 | 208 | DEX0449_036.orf.1 |
| 74 | DEX0449_037.nt.1 | 7p15.3 | 625-1236 | 209 | DEX0449_037.aa.1 |
| 75 | DEX0449_038.nt.1 | 20q13.13 | 2-241 | 210 | DEX0449_038.aa.1 |
| 76 | DEX0449_038.nt.2 | 20q13.13 | 1-244 | 210 | DEX0449_038.aa.1 |
| 76 | DEX0449_038.nt.2 | 20q13.13 | 669-920 | 211 | DEX0449_038.orf.2 |
| 77 | DEX0449_038.nt.3 | 20q13.13 | 1-168 | 212 | DEX0449_038.aa.3 |
| 78 | DEX0449_038.nt.4 | 20q13.13 | 1-244 | 210 | DEX0449_038.aa.1 |
| 79 | DEX0449_039.nt.1 | 1p34.1 | 987-2339 | 213 | DEX0449_039.aa.1 |
| 80 | DEX0449_040.nt.1 | 6p25.3 | 272-1282 | 214 | DEX0449_040.aa.1 |
| 81 | DEX0449_040.nt.2 | 6p25.3 | 272-1267 | 215 | DEX0449_040.aa.2 |
| 82 | DEX0449_040.nt.3 | 6p25.3 | 272-1417 | 216 | DEX0449_040.aa.3 |
| 83 | DEX0449_041.nt.1 | 19 | 1892-2665 | 217 | DEX0449_041.aa.1 |
| 84 | DEX0449_041.nt.2 | 19 | 1653-2442 | 218 | DEX0449_041.aa.2 |
| 84 | DEX0449_041.nt.2 | 19 | 1620-2492 | 219 | DEX0449_041.orf.2 |
| 85 | DEX0449_041.nt.3 | 19 | 1891-2593 | 220 | DEX0449_041.aa.3 |
| 85 | DEX0449_041.nt.3 | 19 | 1475-2644 | 221 | DEX0449_041.orf.3 |
| 86 | DEX0449_042.nt.1 | 17q11.1 | 3-332 | 222 | DEX0449_042.aa.1 |
| 87 | DEX0449_043.nt.1 | X; 22884428-22906568 | 263-1033 | 223 | DEX0449_043.aa.1 |
| 88 | DEX0449_044.nt.1 | 5p13.1 | 143-461 | 224 | DEX0449_044.aa.1 |
| 88 | DEX0449_044.nt.1 | 5p13.1 | 125-457 | 225 | DEX0449_044.orf.1 |
| 89 | DEX0449_044.nt.2 | 5p13.1 | 191-506 | 226 | DEX0449_044.aa.2 |
| 89 | DEX0449_044.nt.2 | 5p13.1 | 16-402 | 227 | DEX0449_044.orf.2 |
| 90 | DEX0449_044.nt.3 | 5p13.1 | 3-290 | 228 | DEX0449_044.aa.3 |
| 91 | DEX0449_044.nt.4 | 5p13.1 | 1-168 | 229 | DEX0449_044.aa.4 |
| 91 | DEX0449_044.nt.4 | 5p13.1 | 51-266 | 230 | DEX0449_044.orf.4 |
| 92 | DEX0449_045.nt.1 | 19q13.41 | 5-563 | 231 | DEX0449_045.aa.1 |
| 92 | DEX0449_045.nt.1 | 19q13.41 | 462-1103 | 232 | DEX0449_045.orf.1 |
| 93 | DEX0449_045.nt.2 | 16q23.1 | 5-398 | 233 | DEX0449_045.aa.2 |
| 93 | DEX0449_045.nt.2 | 16q23.1 | 1-396 | 234 | DEX0449_045.orf.2 |
| 94 | DEX0449_045.nt.3 | 19q13.41 | 10-594 | 235 | DEX0449_045.aa.3 |
| 95 | DEX0449_046.nt.1 | X; 46271396-46272517 | 3-347 | 236 | DEX0449_046.aa.1 |
| 96 | DEX0449_046.nt.2 | X; 46271094-46272517 | 2-469 | 237 | DEX0449_046.aa.2 |
| 97 | DEX0449_047.nt.1 | Un_1; 3772342-3781437 | 19-696 | 238 | DEX0449_047.aa.1 |
| 97 | DEX0449_047.nt.1 | Un_1; 3772342-3781437 | 2470-3228 | 239 | DEX0449_047.orf.1 |
| 98 | DEX0449_047.nt.2 | Un_1; 3772342-3781437 | 19-699 | 238 | DEX0449_047.aa.1 |
| 98 | DEX0449_047.nt.2 | Un_1; 3772342-3781437 | 2470-3507 | 240 | DEX0449_047.orf.2 |
| 99 | DEX0449_048.nt.1 | 11p15.5 | 1-277 | 241 | DEX0449_048.aa.1 |
| 99 | DEX0449_048.nt.1 | 11p15.5 | 91-366 | 242 | DEX0449_048.orf.1 |
| 100 | DEX0449_049.nt.1 | 3q21.3 | 34-447 | 243 | DEX0449_049.aa.1 |
| 100 | DEX0449_049.nt.1 | 3q21.3 | 1-444 | 244 | DEX0449_049.orf.1 |
| 101 | DEX0449_050.nt.1 | 3q21.3 | 86-1522 | 245 | DEX0449_050.aa.1 |
| 102 | DEX0449_050.nt.2 | 3q21.3 | 86-1168 | 246 | DEX0449_050.aa.2 |
| 103 | DEX0449_050.nt.3 | 3q21.3 | 86-1345 | 247 | DEX0449_050.aa.3 |
| 104 | DEX0449_051.nt.1 | 5q35.3 | 2-385 | 248 | DEX0449_051.aa.1 |
| 105 | DEX0449_052.nt.1 | 13q34 | 141-1085 | 249 | DEX0449_052.aa.1 |
| 106 | DEX0449_053.nt.1 | 7q36.3 | 674-1099 | 250 | DEX0449_053.aa.1 |
| 107 | DEX0449_053.nt.2 | 7q36.3 | 402-621 | 251 | DEX0449_053.aa.2 |
| 107 | DEX0449_053.nt.2 | 7q36.3 | 622-987 | 252 | DEX0449_053.orf.2 |
| 108 | DEX0449_054.nt.1 | 9q34.11 | 64-194 | 253 | DEX0449_054.aa.1 |
| 108 | DEX0449_054.nt.1 | 9q34.11 | 895-1674 | 254 | DEX0449_054.orf.1 |
| 109 | DEX0449_054.nt.2 | 9q34.11 | 64-194 | 253 | DEX0449_054.aa.1 |
| 109 | DEX0449_054.nt.2 | 9q34.11 | 195-1049 | 255 | DEX0449_054.orf.2 |
| 110 | DEX0449_055.nt.1 | 19p13.3 | 87-1890 | 256 | DEX0449_055.aa.1 |
| 110 | DEX0449_055.nt.1 | 19p13.3 | 28-1887 | 257 | DEX0449_055.orf.1 |
| 111 | DEX0449_055.nt.2 | 19p13.3 | 26-736 | 258 | DEX0449_055.aa.2 |
| 112 | DEX0449_055.nt.3 | 19p13.3 | 87-1890 | 256 | DEX0449_055.aa.1 |
| 112 | DEX0449_055.nt.3 | 19p13.3 | 28-1887 | 259 | DEX0449_055.orf.3 |

[0446] The polypeptides of the present invention were analyzed and the following attributes were identified; specifically, epitopes, post translational modifications, signal peptides and transmembrane domains. Antigenicity (Epitope) prediction was performed through the antigenic module in the EMBOSS package. Rice, P., EMBOSS: The European Molecular Biology Open Software Suite, Trends in Genetics 16(6): 276-277 (2000). The antigenic module predicts potentially antigenic regions of a protein sequence, using the method of Kolaskar and Tongaonkar. Kolaskar, A S and Tongaonkar, P C., A semi-empirical method for prediction of antigenic determinants on protein antigens, FEBS Letters 276: 172-174 (1990). Examples of post-translational modifications (PTMs) and other motifs of the CSPs of this invention are listed below. In addition, antibodies that specifically bind such post-translational modifications may be useful as a diagnostic or as therapeutic. The PTMs and other motifs were predicted by using the ProSite Dictionary of Proteins Sites and Patterns (Bairoch et al., Nucleic Acids Res. 25(1):217-221 (1997)), the following motifs, including PTMs, were predicted for the CSPs of the invention. The signal peptides were detected by using the SignalP 2.0, see Nielsen et al., Protein Engineering 12, 3-9 (1999). Prediction of transmembrane helices in proteins was performed by the application TMHMM 2.0, “currently the best performing transmembrane prediction program”, according to authors (Krogh et al., Journal of Molecular Biology, 305(3):567-580, (2001); Moller et al., Bioinformatics, 17(7):646-653, (2001); Sonnhammer, et al., A hidden Markov model for predicting transmembrane helices in protein sequences in Glasgow, et al. Ed. Proceedings of the Sixth International Conference on Intelligent Systems for Molecular Biology, pages 175-182, Menlo Park, Calif., 1998. AAAI Press. The PSORT II program may also be used to predict cellular localizations. Horton et al., Intelligent Systems for Molecular Biology 5: 147-152 (1997). The table below includes the following sequence annotations: Signal peptide presence; TM (number of membrane domain, topology in orientation and position); Amino acid location and antigenic index (location, AI score); PTM and other motifs (type, amino acid residue locations); and functional domains (type, amino acid residue locations).

| DEX ID | Sig P | TMHMM | Antigenicity | PTM | Domains |
|---|---|---|---|---|---|
| DEX0449_001.aa.1 | N | 0 - o1-165; | 51-59, 1.044; | MYRISTYL 9-14; | RRM 82-152; rrm 84-154; |
| | | | 98-105, | MYRISTYL 44-49; | RRM 83-155; |
| | | | 1.041; | MYRISTYL 12-17; | GLY_RICH 1-82; |
| | | | 124-130, | CK2_PHOSPHO_SITE | |
| | | | 1.064; | 94-97; MYRISTYL | |
| | | | 65-70, 1.029; | 73-78; MYRISTYL | |
| | | | 143-162, | 40-45; MYRISTYL | |
| | | | 1.163; | 77-82; | |
| | | | 83-96, 1.122; | PKC_PHOSPHO_SITE | |
| | | | 108-116, | 118-120; MYRISTYL | |
| | | | 1.104; | 17-22; | |
| | | | | PKC_PHOSPHO_SITE | |
| | | | | 107-109; | |
| | | | | CK2_PHOSPHO_SITE | |
| | | | | 87-90; MYRISTYL | |
| | | | | 92-97; MYRISTYL | |
| | | | | 16-21; | |
| DEX0449_001.orf.1 | N | 0 - o1-164; | | MYRISTYL 3-8; | RRM 82-154; RRM 81-151; |
| | | | | MYRISTYL 72-77; | GLY_RICH 1-81; |
| | | | | MYRISTYL 15-20; | rrm 83-153; |
| | | | | MYRISTYL 91-96; | |
| | | | | PKC_PHOSPHO_SITE | |
| | | | | 106-108; | |
| | | | | CK2_PHOSPHO_SITE | |
| | | | | 86-89; MYRISTYL | |
| | | | | 39-44; MYRISTYL | |
| | | | | 16-21; MYRISTYL | |
| | | | | 43-48; MYRISTYL | |
| | | | | 11-16; | |
| | | | | CK2_PHOSPHO_SITE | |
| | | | | 93-96; MYRISTYL | |
| | | | | 76-81; | |
| | | | | PKC_PHOSPHO_SITE | |
| | | | | 117-119; | |
| DEX0449_002.aa.1 | N | 0 - o1-256; | 134-156, | PKC_PHOSPHO_SITE | PRO_RICH 80-129; |
| | | | 1.159; | 71-73; MYRISTYL | |
| | | | 116-125, | 199-204; | |
| | | | 1.111; | CK2_PHOSPHO_SITE | |
| | | | 24-34, 1.087; | 128-131; MYRISTYL | |
| | | | 186-196, | 49-54; MYRISTYL | |
| | | | 1.13; | 233-238; MYRISTYL | |
| | | | 71-101, 1.22; | 134-139; | |
| | | | 203-226, | PKC_PHOSPHO_SITE | |
| | | | 1.227; | 34-36; MYRISTYL | |
| | | | 164-180, | 161-166; | |
| | | | 1.143; | | |
| | | | 237-245, | | |
| | | | 1.093; | | |
| DEX0449_002.orf.1 | Y | 0 - o1-250; | 158-167, | MYRISTYL 176-181; | PRO_RICH 122-171; |
| | | | 1.111; | PKC_PHOSPHO_SITE | |
| | | | 66-76, 1.087; | 76-78; MYRISTYL | |
| | | | 113-143, | 91-96; | |
| | | | 1.22; | PKC_PHOSPHO_SITE | |
| | | | 176-198, | 4-6; MYRISTYL | |
| | | | 1.159; | 241-246; MYRISTYL | |
| | | | 9-36, 1.178; | 203-208; | |
| | | | 206-222, | CK2_PHOSPHO_SITE | |
| | | | 1.143; | 170-173; | |
| | | | 228-238, | PKC_PHOSPHO_SITE | |
| | | | 1.13; | 3-5; | |
| | | | | PKC_PHOSPHO_SITE | |
| | | | | 113-115; | |
| DEX0449_003.aa.1 | N | 0 - o1-406; | 82-97, 1.113; | MYRISTYL 335-340; | Glyco_hydro_85 131-385; |
| | | | 201-207; | CK2_PHOSPHO_SITE | |
| | | | 1.14; | 30-33; | |
| | | | 59-75, 1.139; | CK2_PHOSPHO_SITE | |
| | | | 124-130, | 49-52; | |
| | | | 1.123; | PKC_PHOSPHO_SITE | |
| | | | 213-226, | 120-122; | |
| | | | 1.126; | CK2_PHOSPHO_SITE | |
| | | | 142-174, | 89-92; MYRISTYL | |
| | | | 1.207; | 198-203; | |
| | | | 356-375, | PKC_PHOSPHO_SITE | |
| | | | 1.115; | 13-15; | |
| | | | 251-278, | PKC_PHOSPHO_SITE | |
| | | | 1.154; | 49-51; | |
| | | | 388-403, | CK2_PHOSPHO_SITE | |
| | | | 1.127; | 88-91; | |
| | | | 334-340, | PKC_PHOSPHO_SITE | |
| | | | 1.063; | 79-81; | |
| | | | 323-332, | PKC_PHOSPHO_SITE | |
| | | | 1.205; | 344-346; MYRISTYL | |
| | | | 182-191, | 189-194; | |
| | | | 1.186; | ASN_GLYCOSYLATION | |
| | | | 105-121, | 379-382; | |
| | | | 1.136; | | |
| | | | 4-11, 1.111; | | |
| | | | 239-248, | | |
| | | | 1.148; | | |
| | | | 289-300, | | |
| | | | 1.104; | | |
| | | | 20-26, 1.083; | | |
| DEX0449_003.aa.3 | N | 0 - o1-525; | 450-457, | PKC_PHOSPHO_SITE | BRCT 337-383; |
| | | | 1.192; | 79-81; MYRISTYL | Glyco_hydro_85 131-414; |
| | | | 411-418, | 198-203; | |
| | | | 1.091; | CK2_PHOSPHO_SITE | |
| | | | 124-130, | 88-91; MYRISTYL | |
| | | | 1.123; | 189-194; | |
| | | | 347-373, | PKC_PHOSPHO_SITE | |
| | | | 1.136; | 344-346; | |
| | | | 20-26, 1.083; | PKC_PHOSPHO_SITE | |
| | | | 490-502, | 120-122; | |
| | | | 1.207; | PKC_PHOSPHO_SITE | |
| | | | 182-191, | 13-15; MYRISTYL | |
| | | | 1.186; | 335-340; MYRISTYL | |
| | | | 289-300, | 486-491; | |
| | | | 1.104; | CK2_PHOSPHO_SITE | |
| | | | 213-226, | 49-52; | |
| | | | 1.126; | CK2_PHOSPHO_SITE | |
| | | | 105-121, | 428-431; | |
| | | | 1.136; | PKC_PHOSPHO_SITE | |
| | | | 239-248, | 49-51; | |
| | | | 1.148; | CK2_PHOSPHO_SITE | |
| | | | 251-278, | 30-33; MYRISTYL | |
| | | | 1.154; | 416-421; | |
| | | | 142-174, | CK2_PHOSPHO_SITE | |
| | | | 1.207; | 89-92; | |
| | | | 82-97, 1.113; | | |
| | | | 59-75, 1.139; | | |
| | | | 334-340, | | |
| | | | 1.063; | | |
| | | | 462-483, | | |
| | | | 1.166; | | |
| | | | 422-438, | | |
| | | | 1.104; | | |
| | | | 323-332, | | |
| | | | 1.205; | | |
| | | | 201-207, | | |
| | | | 1.14; 4-11, | | |
| | | | 1.111; | | |
| | | | 387-408, | | |
| | | | 1.195; | | |
| DEX0449_003.aa.4 | N | 0 - o1-327; | 11-18, 1.089; | CK2_PHOSPHO_SITE | |
| | | | 270-289, | 175-178; MYRISTYL | |
| | | | 1.165; | 37-42; | |
| | | | 90-97, 1.156; | CK2_PHOSPHO_SITE | |
| | | | 134-143, | 216-219; MYRISTYL | |
| | | | 1.053; | 272-277; | |
| | | | 29-36, 1.1; | PKC_PHOSPHO_SITE | |
| | | | 60-86, 1.143, | 182-184; | |
| | | | 44-57, 1.084; | PKC_PHOSPHO_SITE | |
| | | | 317-324, | 218-220; | |
| | | | 1.169; | CK2_PHOSPHO_SITE | |
| | | | 223-250, | 218-221; | |
| | | | 1.179; | PKC_PHOSPHO_SITE | |
| | | | 120-132, | 122-124; | |
| | | | 1.108; | PKC_PHOSPHO_SITE | |
| | | | 146-171, | 156-158; | |
| | | | 1.237; | CK2_PHOSPHO_SITE | |
| | | | 298-314, | 98-101; | |
| | | | 1.155; | PKC_PHOSPHO_SITE | |
| | | | 182-214, | 118-120; MYRISTYL | |
| | | | 1.168; | 9-14; | |
| | | | 102-115, 1.1; | | |
| DEX0449_003.orf.4 | N | 0 - o1-384; | 119-143, | PKC_PHOSPHO_SITE | |
| | | | 1.143; | 90-92; | |
| | | | 355-371, | PKC_PHOSPHO_SITE | |
| | | | 1.155; | 8-10; | |
| | | | 280-307, | CK2_PHOSPHO_SITE | |
| | | | 1.179; | 273-276; | |
| | | | 177-189, | PKC_PHOSPHO_SITE | |
| | | | 1.108; | 175-177; | |
| | | | 95-112, | CK2_PHOSPHO_SITE | |
| | | | 1.089; | 232-235; | |
| | | | 327-346, | PKC_PHOSPHO_SITE | |
| | | | 1.165; | 179-181; MYRISTYL | |
| | | | 374-381, | 329-334; | |
| | | | 1.169; | CK2_PHOSPHO_SITE | |
| | | | 85-90, 1.061; | 155-158; | |
| | | | 239-271, | CK2_PHOSPHO_SITE | |
| | | | 1.168; | 275-278; MYRISTYL | |
| | | | 191-200, | 94-99; | |
| | | | 1.053; | PKC_PHOSPHO_SITE | |
| | | | 159-172, 1.1; | 239-241; MYRISTYL | |
| | | | 203-228, | 81-86; | |
| | | | 1.237; | PKC_PHOSPHO_SITE | |
| | | | 147-154, | 275-277; | |
| | | | 1.156; | CK2_PHOSPHO_SITE | |
| | | | 4-64, 1.135; | 90-93; MYRISTYL | |
| | | | | 47-52; | |
| | | | | PKC_PHOSPHO_SITE | |
| | | | | 213-215; | |
| DEX0449_003.orf.6 | N | 0 - o1-450; | 147-154, | CK2_PHOSPHO_SITE | |
| | | | 1.156; | 155-158; | |
| | | | 95-112, | PKC_PHOSPHO_SITE | |
| | | | 1.089; | 90-92; | |
| | | | 255-269, | CK2_PHOSPHO_SITE | |
| | | | 1.178; | 90-93; | |
| | | | 159-172, 1.1; | CK2_PHOSPHO_SITE | |
| | | | 421-437, | 232-235; | |
| | | | 1.155; | PKC_PHOSPHO_SITE | |
| | | | 292-337, | 8-10; MYRISTYL | |
| | | | 1.244; | 47-52; MYRISTYL | |
| | | | 4-64, 1.135; | 252-257; MYRISTYL | |
| | | | 440-447, | 287-292; | |
| | | | 1.169; | PKC_PHOSPHO_SITE | |
| | | | 239-250, | 179-181; MYRISTYL | |
| | | | 1.08; | 395-400; | |
| | | | 393-412, | PKC_PHOSPHO_SITE | |
| | | | 1.165; | 341-343; | |
| | | | 177-189, | CK2_PHOSPHO_SITE | |
| | | | 1.108; | 341-344; | |
| | | | 191-200, | PKC_PHOSPHO_SITE | |
| | | | 1.053; | 213-215; | |
| | | | 85-90, 1.061; | CK2_PHOSPHO_SITE | |
| | | | 119-143, | 339-342; | |
| | | | 1.143; | PKC_PHOSPHO_SITE | |
| | | | 346-373, | 239-241; MYRISTYL | |
| | | | 1.179; | 81-86; MYRISTYL | |
| | | | 271-278, | 94-99; | |
| | | | 1.063; | PKC_PHOSPHO_SITE | |
| | | | 203-228, | 175-177; | |
| | | | 1.237; | | |
| DEX0449_003.aa.7 | N | 0 - o1-302; | 82-97, 1.113; | PKC_PHOSPHO_SITE | Glyco_hydro_85 131-297; |
| | | | 292-299, | 79-81; | |
| | | | 1.169; | CK2_PHOSPHO_SITE | |
| | | | 273-289, | 30-33; MYRISTYL | |
| | | | 1.155; | 189-194; | |
| | | | 20-26, 1.083; | PKC_PHOSPHO_SITE | |
| | | | 124-130, | 120-122; MYRISTYL | |
| | | | 1.123; | 198-203; | |
| | | | 105-121, | CK2_PHOSPHO_SITE | |
| | | | 1.136; | 49-52; | |
| | | | 239-248, | PKC_PHOSPHO_SITE | |
| | | | 1.148; | 49-51; | |
| | | | 182-191, | CK2_PHOSPHO_SITE | |
| | | | 1.186; | 88-91; | |
| | | | 251-264, | PKC_PHOSPHO_SITE | |
| | | | 1.138; | 13-15; | |
| | | | 201-207, | CK2_PHOSPHO_SITE | |
| | | | 1.14; | 89-92; | |
| | | | 213-226, | | |
| | | | 1.126; | | |
| | | | 59-75, 1.139; | | |
| | | | 4-11, 1.111; | | |
| | | | 142-174, | | |
| | | | 1.207; | | |
| DEX0449_004.aa.1 | Y | 1 - o1-62; | 4-19, 1.198; | PKC_PHOSPHO_SITE | Sterol_desat 1-129; |
| | | tm63-85; | 55-67, 1.104; | 87-89; | SUR2_DOMAIN 18-126; |
| | | i86-162; | 22-48, 1.14; | CK2_PHOSPHO_SITE | |
| | | | 69-116, | 98-101; | |
| | | | 1.236; | CK2_PHOSPHO_SITE | |
| | | | | 135-138; MYRISTYL | |
| | | | | 128-133; | |
| DEX0449_005.aa.1 | N | 0 - o1-206; | 186-197, | CK2_PHOSPHO_SITE | |
| | | | 1.16; | 100-103; | |
| | | | 36-45, 1.101; | PKC_PHOSPHO_SITE | |
| | | | 97-119, | 7-9; | |
| | | | 1.199; | CK2_PHOSPHO_SITE | |
| | | | 163-173, | 42-45; | |
| | | | 1.076; | PKC_PHOSPHO_SITE | |
| | | | 142-147, | 194-196; | |
| | | | 1.042; | PKC_PHOSPHO_SITE | |
| | | | 8-31, 1.142; | 42-44; MYRISTYL | |
| | | | 58-76, 1.16; | 75-80; | |
| | | | | PKC_PHOSPHO_SITE | |
| | | | | 183-185; | |
| DEX0449_005.orf.1 | N | 0 - o1-380; | 156-178, | MYRISTYL 261-266; | |
| | | | 1.199; | PKC_PHOSPHO_SITE | |
| | | | 349-355, | 101-103; | |
| | | | 1.062; | CK2_PHOSPHO_SITE | |
| | | | 243-259, | 40-43; MYRISTYL | |
| | | | 1.168; | 52-57; | |
| | | | 117-135, | PKC_PHOSPHO_SITE | |
| | | | 1.16; | 310-312; | |
| | | | 95-104, | PKC_PHOSPHO_SITE | |
| | | | 1.101; | 332-334; | |
| | | | 4-10, 1.175; | CK2_PHOSPHO_SITE | |
| | | | 275-293, | 333-336; | |
| | | | 1.148; | CK2_PHOSPHO_SITE | |
| | | | 360-371, | 101-104; | |
| | | | 1.088; | PKC_PHOSPHO_SITE | |
| | | | 43-54, 1.098; | 66-68; | |
| | | | 315-322, | CK2_PHOSPHO_SITE | |
| | | | 1.094; | 310-313; | |
| | | | 217-235, | CK2_PHOSPHO_SITE | |
| | | | 1.131; | 302-305; MYRISTYL | |
| | | | 296-304, | 134-139; | |
| | | | 1.127; | CK2_PHOSPHO_SITE | |
| | | | 17-31, 1.101; | 159-162; | |
| | | | 261-267, | PKC_PHOSPHO_SITE | |
| | | | 1.072; | 9-11; MYRISTYL | |
| | | | 201-206, | 221-226; | |
| | | | 1.042; | | |
| | | | 67-90, 1.142; | | |
| DEX0449_005.orf.2 | N | 0 - o1-380; | 217-235, | PKC_PHOSPHO_SITE | |
| | | | 1.131; | 101-103; | |
| | | | 296-304, | PKC_PHOSPHO_SITE | |
| | | | 1.127; | 66-68; | |
| | | | 156-178, | CK2_PHOSPHO_SITE | |
| | | | 1.199; | 310-313; | |
| | | | 95-104, | CK2_PHOSPHO_SITE | |
| | | | 1.101; | 302-305; MYRISTYL | |
| | | | 349-355, | 261-266; | |
| | | | 1.062; | PKC_PHOSPHO_SITE | |
| | | | 67-90, 1.142; | 310-312; MYRISTYL | |
| | | | 17-31, 1.101; | 134-139; | |
| | | | 201-206, | CK2_PHOSPHO_SITE | |
| | | | 1.042; | 159-162; MYRISTYL | |
| | | | 243-259, | 52-57; | |
| | | | 1.168; | PKC_PHOSPHO_SITE | |
| | | | 261-267, | 9-11; | |
| | | | 1.072; | CK2_PHOSPHO_SITE | |
| | | | 43-54, 1.098; | 101-104; | |
| | | | 315-322, | CK2_PHOSPHO_SITE | |
| | | | 1.094; | 40-43; | |
| | | | 4-10, 1.175; | CK2_PHOSPHO_SITE | |
| | | | 275-293, | 333-336; | |
| | | | 1.148; | PKC_PHOSPHO_SITE | |
| | | | 360-371, | 332-334; MYRISTYL | |
| | | | 1.088; | 221-226; | |
| | | | 117-135, | | |
| | | | 1.16; | | |
| DEX0449_005.aa.3 | N | 0 - o1-334; | 94-105, | CAMP_PHOSPHO_SITE | |
| | | | 1.164; | 73-76; MYRISTYL | |
| | | | 46-52, 1.071; | 95-100; | |
| | | | 114-124, | PKC_PHOSPHO_SITE | |
| | | | 1.143; | 135-137; | |
| | | | 270-275, | CK2_PHOSPHO_SITE | |
| | | | 1.042; | 170-173; MYRISTYL | |
| | | | 225-247, | 85-90; | |
| | | | 1.199; | PKC_PHOSPHO_SITE | |
| | | | 314-325, | 170-172; | |
| | | | 1.16; | PKC_PHOSPHO_SITE | |
| | | | 186-204, | 322-324; MYRISTYL | |
| | | | 1.16; | 71-76; MYRISTYL | |
| | | | 291-301, | 51-56; MYRISTYL | |
| | | | 1.076; | 31-36; | |
| | | | 136-159, | PKC_PHOSPHO_SITE | |
| | | | 1.142; | 311-313; | |
| | | | 10-16, 1.095; | PKC_PHOSPHO_SITE | |
| | | | 18-37, 1.212; | 28-30; MYRISTYL | |
| | | | 164-173, | 82-87; MYRISTYL | |
| | | | 1.101; | 46-51; MYRISTYL | |
| | | | 76-86, 1.121; | 203-208; | |
| | | | 59-65, 1.085; | CK2_PHOSPHO_SITE | |
| | | | | 228-231; | |
| DEX0449_005.orf.3 | N | 0 - o1-327; | 307-318, | MYRISTYL 168-173; | |
| | | | 1.088; | CK2_PHOSPHO_SITE | |
| | | | 64-82, 1.16; | 257-260; MYRISTYL | |
| | | | 243-251, | 81-86; | |
| | | | 1.127; | PKC_PHOSPHO_SITE | |
| | | | 262-269, | 257-259; | |
| | | | 1.094; | CK2_PHOSPHO_SITE | |
| | | | 164-182, | 280-283; MYRISTYL | |
| | | | 1.131; | 208-213; | |
| | | | 148-153, | CK2_PHOSPHO_SITE | |
| | | | 1.042; | 48-51; | |
| | | | 42-51, 1.101; | CK2_PHOSPHO_SITE | |
| | | | 296-302, | 106-109; | |
| | | | 1.062; | CK2_PHOSPHO_SITE | |
| | | | 222-240, | 3-6; | |
| | | | 1.148; | CK2_PHOSPHO_SITE | |
| | | | 14-37, 1.142; | 249-252; | |
| | | | 208-214, | PKC_PHOSPHO_SITE | |
| | | | 1.072; | 48-50; | |
| | | | 190-206, | PKC_PHOSPHO_SITE | |
| | | | 1.168; | 279-281; | |
| | | | 103-125, | PKC_PHOSPHO_SITE | |
| | | | 1.199; | 13-15; | |
| DEX0449_005.aa.4 | N | 0 - o1-161; | 36-45, 1.101; | PKC_PHOSPHO_SITE | |
| | | | 142-147, | 42-44; | |
| | | | 1.042; | ASN_GLYCOSYLATION | |
| | | | 58-76, 1.16; | 154-157; MYRISTYL | |
| | | | 97-119, | 75-80; | |
| | | | 1.199; | CK2_PHOSPHO_SITE | |
| | | | 8-31, 1.142; | 42-45; | |
| | | | | PKC_PHOSPHO_SITE | |
| | | | | 156-158; | |
| | | | | PKC_PHOSPHO_SITE | |
| | | | | 7-9; | |
| | | | | CK2_PHOSPHO_SITE | |
| | | | | 100-103; | |
| DEX0449_005.orf.6 | N | 0 - o1-326; | 156-178, | MYRISTYL 261-266; | |
| | | | 1.199; | PKC_PHOSPHO_SITE | |
| | | | 217-235, | 9-11; MYRISTYL | |
| | | | 1.131; | 221-226; | |
| | | | 43-54, 1.098; | PKC_PHOSPHO_SITE | |
| | | | 67-90, 1.142; | 66-68; | |
| | | | 296-314, | CK2_PHOSPHO_SITE | |
| | | | 1.123; | 101-104; MYRISTYL | |
| | | | 261-267, | 134-139; MYRISTYL | |
| | | | 1.072; | 52-57; | |
| | | | 117-135, | PKC_PHOSPHO_SITE | |
| | | | 1.16; | 101-103; | |
| | | | 275-293; | CK2_PHOSPHO_SITE | |
| | | | 1.148; | 40-43; | |
| | | | 201-206, | CK2_PHOSPHO_SITE | |
| | | | 1.042; | 159-162; | |
| | | | 243-259, | | |
| | | | 1.168; | | |
| | | | 17-31, 1.101; | | |
| | | | 4-10, 1.175; | | |
| | | | 95-104, | | |
| | | | 1.101; | | |
| DEX0449_006.aa.1 | N | 0 - o1-216; | 23-80, 1.213; | CK2_PHOSPHO_SITE | PRO_RICH 31-209; |
| | | | 88-99, 1.097, | 89-92; | |
| | | | 123-140, | PKC_PHOSPHO_SITE | |
| | | | 1.268; | 99-101; MYRISTYL | |
| | | | 9-15, 1.084; | 84-89; | |
| | | | 109-116, | CAMP_PHOSPHO_SITE | |
| | | | 1.12; | 79-82; | |
| | | | 142-207, | | |
| | | | 1.19; | | |
| DEX0449_007.aa.1 | Y | 0 - o1-108; | 4-10, 1.067; | PKC_PHOSPHO_SITE | SMALLCYTKCXC 75-83; |
| | | | 46-52, 1.055; | 36-38; | SMALLCYTKCXC 90-108; |
| | | | 12-30, 1.269; | PKC_PHOSPHO_SITE | |
| | | | 59-105, 1.18; | 29-31; | |
| | | | 39-44, 1.054; | | |
| DEX0449_007.orf.1 | Y | 0 - o1-142; | 67-73, 1.058; | PKC_PHOSPHO_SITE | SMALLCYTKCXC 124-142; |
| | | | 46-58, 1.043; | 10-12; MYRISTYL | INTERLEUKIN8 |
| | | | 93-139, 1.18; | 7-12; | 125-142; |
| | | | 4-30, 1.163; | | INTERLEUKIN8 102-125; |
| | | | 37-44, 1.048; | | SMALLCYTKCXC |
| | | | | | 109-117; |
| DEX0449_008.aa.1 | N | 0 - o1-482; | 298-306, | MYRISTYL 44-49; | RRM 332-405; RRM |
| | | | 1.134; | ASN_GLYCOSYLATION | 331-409; NTF2 11-133; |
| | | | 176-183, | 317-320; | GLY_RICH 419-479; |
| | | | 1.113; | PKC_PHOSPHO_SITE | NTF2_DOMAIN |
| | | | 16-33, 1.107, | 48-50; | 11-133; rrm 333-404; |
| | | | 325-341, | ASN_GLYCOSYLATION | sp_Q9UPA1_Q9UPA1_HUMAN |
| | | | 1.104; | 285-288; MYRISTYL | 11-132; |
| | | | 38-45, 1.113, | 43-48; | GLU_RICH 134-223; |
| | | | 373-394, | CK2_PHOSPHO_SITE | |
| | | | 1.127; | 141-144; | |
| | | | 285-294, | TYR_PHOSPHO_SITE | |
| | | | 1.256; | 50-56; MYRISTYL | |
| | | | 257-275, | 96-101; | |
| | | | 1.079; | ASN_GLYCOSYLATION | |
| | | | 354-361, | 69-72; MYRISTYL | |
| | | | 1.095; | 258-263; MYRISTYL | |
| | | | 230-254, | 471-476; | |
| | | | 1.098; | ASN_GLYCOSYLATION | |
| | | | 52-58, 1.067; | 37-40; | |
| | | | 121-128, | PKC_PHOSPHO_SITE | |
| | | | 1.113; | 250-252; | |
| | | | 7-14, 1.136; | CK2_PHOSPHO_SITE | |
| | | | 110-119, | 204-207; MYRISTYL | |
| | | | 1.111; | 435-440; | |
| | | | 62-101, | CK2_PHOSPHO_SITE | |
| | | | 1.184; | 85-88; MYRISTYL | |
| | | | | 465-470; | |
| | | | | CK2_PHOSPHO_SITE | |
| | | | | 192-195; | |
| | | | | PKC_PHOSPHO_SITE | |
| | | | | 466-468; MYRISTYL | |
| | | | | 118-123; MYRISTYL | |
| | | | | 439-444; | |
| | | | | CK2_PHOSPHO_SITE | |
| | | | | 149-152; | |
| DEX0449_008.orf.1 | N | 0 - o1-392; | 4-12, 1.235; | CK2_PHOSPHO_SITE | RRM 242-315; |
| | | | 264-271, | 59-62; RGD 221-223; | HUDSXLRNA 246-261; |
| | | | 1.095; | MYRISTYL | HUDSXLRNA 261-273; |
| | | | 283-304; | 168-173; | rrm 243-314; |
| | | | 1.127; | CK2_PHOSPHO_SITE | PRICHEXTENSN 101-122; |
| | | | 235-251; | 114-117; | PRICHEXTENSN |
| | | | 1.104; | CK2_PHOSPHO_SITE | 194-219; GLU_RICH |
| | | | 86-93, 1.113; | 102-105; MYRISTYL | 52-133; |
| | | | 37-45, 1.123; | 345-350; | PRICHEXTENSN 164-181; |
| | | | 140-165, | PKC_PHOSPHO_SITE | GLY_RICH 329-389; |
| | | | 1.098; | 376-378; | RRM 241-319; |
| | | | 16-33, 1.144; | PKC_PHOSPHO_SITE | PRICHEXTENSN 136-152; |
| | | | 167-201, | 160-162; MYRISTYL | PRO_RICH 138-219; |
| | | | 1.142; | 375-380; | |
| | | | | ASN_GLYCOSYLATION | |
| | | | | 227-230; MYRISTYL | |
| | | | | 349-354; | |
| | | | | CK2_PHOSPHO_SITE | |
| | | | | 51-54; MYRISTYL | |
| | | | | 381-386; | |
| DEX0449_009.aa.1 | N | 0 - o1-316; | 159-175, | CK2_PHOSPHO_SITE | RRM 166-239; rrm |
| | | | 1.104; | 71-74; | 167-238; HUDSXLRNA |
| | | | 233-239, | CK2_PHOSPHO_SITE | 170-185; HUDSXLRNA |
| | | | 1.056; | 16-19; MYRISTYL | 185-197; GLU_RICH |
| | | | 94-107, | 269-274; | 17-90; RRM 165-243; |
| | | | 1.098; | ASN_GLYCOSYLATION | PRO_RICH 95-143; |
| | | | 207-228, | 151-154; MYRISTYL | GLY_RICH 253-313; |
| | | | 1.127; | 305-310; | |
| | | | 109-128, | PKC_PHOSPHO_SITE | |
| | | | 1.075; | 300-302; | |
| | | | 30-37, 1.065; | CK2_PHOSPHO_SITE | |
| | | | 5-15, 1.225; | 14-17; MYRISTYL | |
| | | | 188-195, | 299-304; MYRISTYL | |
| | | | 1.095; | 273-278; RGD 145-147; | |
| | | | 41-50, 1.113; | CK2_PHOSPHO_SITE | |
| | | | 135-140, | 59-62; | |
| | | | 0.986; | | |
| DEX0449_009.orf.1 | N | 0 - o1-314; | | MYRISTYL 267-272; | HUDSXLRNA 183-195; |
| | | | | MYRISTYL 271-276; | GLU_RICH 15-88; |
| | | | | ASN_GLYCOSYLATION | PRO_RICH 93-141; |
| | | | | 149-152; MYRISTYL | RRM 164-237; rrm |
| | | | | 2-7; | 165-236; GLY_RICH |
| | | | | ASN_GLYCOSYLATION | 251-311; HUDSXLRNA |
| | | | | 4-7; RGD 143-145; | 168-183; RRM 163-241; |
| | | | | PKC_PHOSPHO_SITE | |
| | | | | 298-300; | |
| | | | | CK2_PHOSPHO_SITE | |
| | | | | 57-60; MYRISTYL | |
| | | | | 297-302; | |
| | | | | CK2_PHOSPHO_SITE | |
| | | | | 14-17; MYRISTYL | |
| | | | | 303-308; | |
| | | | | CK2_PHOSPHO_SITE | |
| | | | | 12-15; | |
| | | | | CK2_PHOSPHO_SITE | |
| | | | | 69-72; | |
| DEX0449_009.aa.2 | N | 0 - i1-169; | 41-48, 1.095; | MYRISTYL 126-131; | RRM 19-92; |
| | | | 125-130, | MYRISTYL 122-127; | HUDSXLRNA 23-38; |
| | | | 1.013; | MYRISTYL 152-157; | GLY_RICH 106-166; |
| | | | 11-28, 1.104; | MYRISTYL 158-163; | RRM 18-96; |
| | | | 86-92, 1.056; | ASN_GLYCOSYLATION | HUDSXLRNA 38-50; |
| | | | 55-82, 1.127; | 4-7; | rrm 20-91; |
| | | | | PKC_PHOSPHO_SITE | |
| | | | | 153-155; | |
| DEX0449_010.aa.1 | N | 0 - i1-147; | 85-99, 1.144; | PKC_PHOSPHO_SITE | Ribosomal_S17e 1-122; |
| | | | 9-23, 1.113; | 43-45; | RIBOSOMAL_S17E |
| | | | 66-73, 1.073; | PKC_PHOSPHO_SITE | 41-56; |
| | | | 51-59, 1.107; | 8-10; MYRISTYL | |
| | | | 106-112, | 112-117; | |
| | | | 1.085; | PKC_PHOSPHO_SITE | |
| | | | 114-134, | 70-72; | |
| | | | 1.13; | TYR_PHOSPHO_SITE | |
| | | | 31-44, 1.124; | 14-21; | |
| | | | | PKC_PHOSPHO_SITE | |
| | | | | 30-32; | |
| | | | | CK2_PHOSPHO_SITE | |
| | | | | 89-92; | |
| | | | | PKC_PHOSPHO_SITE | |
| | | | | 142-144; | |
| DEX0449_010.orf.1 | Y | 0 - o1-166; | | PKC_PHOSPHO_SITE | Ribosomal_S17e 20-141; |
| | | | | 27-29; | RIBOSOMAL_S17E |
| | | | | PKC_PHOSPHO_SITE | 60-75; |
| | | | | 89-91; | |
| | | | | PKC_PHOSPHO_SITE | |
| | | | | 62-64; | |
| | | | | PKC_PHOSPHO_SITE | |
| | | | | 161-163; | |
| | | | | TYR_PHOSPHO_SITE | |
| | | | | 33-40; | |
| | | | | PKC_PHOSPHO_SITE | |
| | | | | 49-51; | |
| | | | | CK2_PHOSPHO_SITE | |
| | | | | 108-111; MYRISTYL | |
| | | | | 131-136; | |
| | | | | PKC_PHOSPHO_SITE | |
| | | | | 132-134; | |
| DEX0449_011.aa.1 | N | 0 - o1-254; | 90-105, | CK2_PHOSPHO_SITE | TFIIS 216-251; |
| | | | 1.105; | 209-212; | ZnF_C2C2 214-253; |
| | | | 221-232, | CAMP_PHOSPHO_SITE | TFS2M 91-192; TFSII |
| | | | 1.115; | 7-10; | 1-254; TFIIS 214-252; |
| | | | 213-219, | CK2_PHOSPHO_SITE | |
| | | | 1.125; | 35-38; | |
| | | | 15-32, 1.096; | CK2_PHOSPHO_SITE | |
| | | | 160-173, | 233-236; | |
| | | | 1.13; | ASN_GLYCOSYLATION | |
| | | | 239-247, | 192-195; | |
| | | | 1.187; | PKC_PHOSPHO_SITE | |
| | | | 77-87, 1.09; | 35-37; | |
| | | | | ASN_GLYCOSYLATION | |
| | | | | 223-226; | |
| | | | | CK2_PHOSPHO_SITE | |
| | | | | 11-14; | |
| | | | | PKC_PHOSPHO_SITE | |
| | | | | 67-69; | |
| | | | | CK2_PHOSPHO_SITE | |
| | | | | 107-110; MYRISTYL | |
| | | | | 64-69; | |
| | | | | CK2_PHOSPHO_SITE | |
| | | | | 10-13; | |
| | | | | PKC_PHOSPHO_SITE | |
| | | | | 25-27; | |
| | | | | CK2_PHOSPHO_SITE | |
| | | | | 123-126; | |
| | | | | PKC_PHOSPHO_SITE | |
| | | | | 92-94; | |
| | | | | ASN_GLYCOSYLATION | |
| | | | | 65-68; | |
| | | | | TYR_PHOSPHO_SITE | |
| | | | | 134-140; | |
| | | | | CK2_PHOSPHO_SITE | |
| | | | | 177-180; | |
| | | | | CK2_PHOSPHO_SITE | |
| | | | | 88-91; MYRISTYL | |
| | | | | 207-212; | |
| DEX0449_011.orf.1 | Y | 0 - o1-302; | 208-221, | CAMP_PHOSPHO_SITE | TFSII 2-302; TFIIS |
| | | | 1.13; | 55-58; | 264-299; TFS2M 139-240; |
| | | | 261-267, | ASN_GLYCOSYLATION | TFS2N 12-80; |
| | | | 1.125; | 271-274; | ZnF_C2C2 262-301; |
| | | | 4-20, 1.264; | CK2_PHOSPHO_SITE | TFIIS 262-300; |
| | | | 125-134, | 59-62; | |
| | | | 1.09; | PKC_PHOSPHO_SITE | |
| | | | 138-148, | 140-142; | |
| | | | 1.105; | CK2_PHOSPHO_SITE | |
| | | | 63-76, 1.096; | 83-86; | |
| | | | 25-32, 1.092; | TYR_PHOSPHO_SITE | |
| | | | 269-280, | 182-188; | |
| | | | 1.115; | CK2_PHOSPHO_SITE | |
| | | | 38-45, 1.077; | 281-284; | |
| | | | 287-294, | CK2_PHOSPHO_SITE | |
| | | | 1.187; | 58-61; MYRISTYL | |
| | | | | 255-260; | |
| | | | | CK2_PHOSPHO_SITE | |
| | | | | 136-139; | |
| | | | | ASN_GLYCOSYLATION | |
| | | | | 240-243; | |
| | | | | CK2_PHOSPHO_SITE | |
| | | | | 171-174; | |
| | | | | PKC_PHOSPHO_SITE | |
| | | | | 44-46; | |
| | | | | CK2_PHOSPHO_SITE | |
| | | | | 225-228; | |
| | | | | PKC_PHOSPHO_SITE | |
| | | | | 115-117; | |
| | | | | CK2_PHOSPHO_SITE | |
| | | | | 257-260; | |
| | | | | PKC_PHOSPHO_SITE | |
| | | | | 83-85; MYRISTYL | |
| | | | | 112-117; | |
| | | | | ASN_GLYCOSYLATION | |
| | | | | 113-116; | |
| | | | | PKC_PHOSPHO_SITE | |
| | | | | 73-75; MYRISTYL | |
| | | | | 48-53; | |
| | | | | CK2_PHOSPHO_SITE | |
| | | | | 155-158; | |
| DEX0449_012.aa.1 | N | 0 - o1-225; | 92-98, 1.091; | MYRISTYL 110-115; | HAD-SF-IB 16-190; |
| | | | 159-168, | CK2_PHOSPHO_SITE | serB 1-220; |
| | | | 1.118; | 114-117; | Hydrolase 14-200; |
| | | | 34-43, 1.152; | CK2_PHOSPHO_SITE | |
| | | | 132-138, | 3-6; | |
| | | | 1.052; | CK2_PHOSPHO_SITE | |
| | | | 113-125, | 182-185; | |
| | | | 1.136; | PKC_PHOSPHO_SITE | |
| | | | 63-71, 1.115; | 63-65; MYRISTYL | |
| | | | 4-26, 1.152; | 39-44; | |
| | | | 73-89, 1.107; | PKC_PHOSPHO_SITE | |
| | | | 100-110, | 48-50; | |
| | | | 1.184; | | |
| | | | 186-195, | | |
| | | | 1.089; | | |
| | | | 54-61, 1.121; | | |
| | | | 213-222, | | |
| | | | 1.101; | | |
| DEX0449_013.aa.1 | N | 0 - o1-249; | 33-43, 1.16; | PKC_PHOSPHO_SITE | |
| | | | 210-218, | 16-18; | |
| | | | 1.114; | CK2_PHOSPHO_SITE | |
| | | | 198-208, | 216-219; MYRISTYL | |
| | | | 1.067; | 41-46; | |
| | | | 133-155, | PKC_PHOSPHO_SITE | |
| | | | 1.217; | 204-206; MYRISTYL | |
| | | | 163-191, | 212-217; | |
| | | | 1.174; | PKC_PHOSPHO_SITE | |
| | | | 74-80, 1.077; | 15-17; MYRISTYL | |
| | | | 113-123, | 33-38; | |
| | | | 1.179; | CK2_PHOSPHO_SITE | |
| | | | 232-246, | 47-50; | |
| | | | 1.117; | TYR_PHOSPHO_SITE | |
| | | | 83-106, | 61-68; | |
| | | | 1.227; | CK2_PHOSPHO_SITE | |
| | | | 54-71, 1.119; | 162-165; MYRISTYL | |
| | | | 21-28, 1.053; | 138-143; | |
| | | | 125-131, | | |
| | | | 1.082; | | |
| DEX0449_014.aa.1 | N | 0 - o1-113; | 31-45, 1.147; | PKC_PHOSPHO_SITE | RCC1_2 66-76; |
| | | | 57-80, 1.147; | 23-25; | |
| | | | | CK2_PHOSPHO_SITE | |
| | | | | 107-110; | |
| | | | | PKC_PHOSPHO_SITE | |
| | | | | 17-19; | |
| | | | | CK2_PHOSPHO_SITE | |
| | | | | 98-101; | |
| | | | | PKC_PHOSPHO_SITE | |
| | | | | 8-10; | |
| | | | | CK2_PHOSPHO_SITE | |
| | | | | 54-57; | |
| | | | | ASN_GLYCOSYLATION | |
| | | | | 52-55; | |
| | | | | CK2_PHOSPHO_SITE | |
| | | | | 17-20; | |
| | | | | ASN_GLYCOSYLATION | |
| | | | | 14-17; | |
| DEX0449_015.aa.1 | N | 0 - o1-102; | 83-89, 1.072; | PKC_PHOSPHO_SITE | |
| | | | 17-38, 1.144; | 59-61; | |
| | | | 43-51, 1.06; | | |
| | | | 65-78, 1.148; | | |
| | | | 91-99, 1.076; | | |
| DEX0449_016.aa.1 | N | 0 - o1-412; | 362-391, | MYRISTYL 185-190; | CYTOCHROME_P450 |
| | | | 1.147; | MYRISTYL 226-231; | 348-357; |
| | | | 263-294, | CK2_PHOSPHO_SITE | PRICHEXTENSN 46-67; |
| | | | 1.164; | 134-137; | EP450I 270-288; |
| | | | 297-318, | PKC_PHOSPHO_SITE | P450 355-366; |
| | | | 1.186; | 398-400; MYRISTYL | PRICHEXTENSN 204-229; |
| | | | 351-359, | 38-43; MYRISTYL | EP450I 345-355; |
| | | | 1.147; | 383-388; | EP450I 173-190; |
| | | | 329-349, | CK2_PHOSPHO_SITE | P450 271-282; |
| | | | 1.091; | 290-293; | EP450I 193-219; |
| | | | 403-409, | AMIDATION 350-353; | P450 184-201; p450 |
| | | | 1.179; | CK2_PHOSPHO_SITE | 3-408; EP450I 355-378; |
| | | | 44-70, 1.113; | 151-154; | EP450I 310-334; |
| | | | 245-254, | PKC_PHOSPHO_SITE | P450 346-355; |
| | | | 1.08; | 257-259; MYRISTYL | |
| | | | 191-201, | 42-47; MYRISTYL | |
| | | | 1.112; | 222-227; | |
| | | | 233-243, | PKC_PHOSPHO_SITE | |
| | | | 1.061; | 2-4; | |
| | | | 84-125, | | |
| | | | 1.211; | | |
| | | | 171-182, | | |
| | | | 1.135; | | |
| | | | 23-36, 1.193; | | |
| | | | 5-21, 1.155; | | |
| | | | 127-159, | | |
| | | | 1.183; | | |
| DEX0449-016.orf.1 | N | 0 - o1-203; | 36-45, 1.08; | PKC_PHOSPHO_SITE | EP450I 18-44; P450 |
| | | | 194-200, | 48-50; | 27-40; BP450 146-157; |
| | | | 1.179; | PKC_PHOSPHO_SITE | P450 146-157; |
| | | | 22-34, 1.085; | 15-17; AMIDATION | EP450I 61-79; BP450 |
| | | | 88-109, | 141-144; | 137-146; P450 62-73; |
| | | | 1.186; | CK2_PHOSPHO_SITE | CYTOCHROME_P450 |
| | | | 8-14, 1.041; | 81-84; | 139-148, EP450IV |
| | | | 153-182, | CK2_PHOSPHO_SITE | 57-73; EP450IV 146-164; |
| | | | 1.147; | 15-18; MYRISTYL | EP450I 146-169; |
| | | | 142-150, | 174-179; | EP450IV 130-146; |
| | | | 1.147; | PKC_PHOSPHO_SITE | EP450I 136-146; |
| | | | 120-140, | 189-191; | EP450I 101-125; |
| | | | 1.091; | | BP450 79-106; |
| | | | 54-85, 1.164; | | EP450IV 106-124; |
| | | | | | P450 137-146; BP450 |
| | | | | | 62-73; |
| DEX0449_017.aa.1 | Y | 0 - i1-116; | 74-87, 1.16; | ASN_GLYCOSYLATION | |
| | | | 99-108, | 94-97; | |
| | | | 1.095; | ASN_GLYCOSYLATION | |
| | | | 4-31, 1.198; | 64-67; | |
| | | | 48-71, 1.145; | PKC_PHOSPHO_SITE | |
| | | | | 98-100; | |
| DEX0449_017.orf.1 | N | 0 - o1-141; | 126-138, | PKC_PHOSPHO_SITE | |
| | | | 1.16; | 43-45; RGD 58-60; | |
| | | | 25-30, 1.033; | ASN_GLYCOSYLATION | |
| | | | 100-123, | 116-119; | |
| | | | 1.145; | AMIDATION 21-24; | |
| | | | 38-44, 1.04; | PKC_PHOSPHO_SITE | |
| | | | 73-80, 1.087; | 31-33; MYRISTYL | |
| | | | 87-93, 1.083; | 92-97; MYRISTYL | |
| | | | 11-21, 1.245; | 25-30; MYRISTYL | |
| | | | 58-68, 1.175; | 21-26; | |
| DEX0449_018.aa.1 | N | 0 - o1-426; | 5-43, 1.154; | CAMP_PHOSPHO_SITE | ZINC_FINGER_C2H2_1 |
| | | | 106-116, | 329-332; | 74-96; |
| | | | 1.117; | CK2_PHOSPHO_SITE | |
| | | | 90-95, 1.044; | 377-380; | |
| | | | 356-363, | PKC_PHOSPHO_SITE | |
| | | | 1.107; | 229-231; | |
| | | | 224-231, | PKC_PHOSPHO_SITE | |
| | | | 1.101; | 328-330; | |
| | | | 322-328, | CK2_PHOSPHO_SITE | |
| | | | 1.077; | 135-138; | |
| | | | 70-80, 1.145; | CK2_PHOSPHO_SITE | |
| | | | 293-299, | 75-78; | |
| | | | 1.08; | TYR_PHOSPHO_SITE | |
| | | | 205-221, | 264-272; | |
| | | | 1.197; | CK2_PHOSPHO_SITE | |
| | | | 172-187, | 120-123; | |
| | | | 1.186; | CK2_PHOSPHO_SITE | |
| | | | 192-199, | 137-140; | |
| | | | 1.115; | PKC_PHOSPHO_SITE | |
| | | | 271-282, | 368-370; | |
| | | | 1.08; | CAMP_PHOSPHO_SITE | |
| | | | 154-169, | 241-244; | |
| | | | 1.132; | CK2_PHOSPHO_SITE | |
| | | | 401-418, | 128-131; MYRISTYL | |
| | | | 1.128; | 129-134; RGD 316-318; | |
| | | | 59-65, 1.037; | PKC_PHOSPHO_SITE | |
| | | | 45-50, 1.049; | 69-71; | |
| | | | 333-351, | CK2_PHOSPHO_SITE | |
| | | | 1.138; | 111-114; | |
| | | | | PKC_PHOSPHO_SITE | |
| | | | | 301-303; | |
| | | | | PKC_PHOSPHO_SITE | |
| | | | | 398-400; MYRISTYL | |
| | | | | 243-248; | |
| | | | | CK2_PHOSPHO_SITE | |
| | | | | 332-335; | |
| | | | | PKC_PHOSPHO_SITE | |
| | | | | 237-239; MYRISTYL | |
| | | | | 247-252; | |
| | | | | CAMP_PHOSPHO_SITE | |
| | | | | 374-377; | |
| | | | | CK2_PHOSPHO_SITE | |
| | | | | 15-18; | |
| | | | | CK2_PHOSPHO_SITE | |
| | | | | 368-371; | |
| DEX0449_018.aa.4 | N | 0 - o1-370; | 237-243, | TYR_PHOSPHO_SITE | |
| | | | 1.08; | 208-216; | |
| | | | 215-226, | CK2_PHOSPHO_SITE | |
| | | | 1.08; | 276-279; | |
| | | | 345-362, | CK2_PHOSPHO_SITE | |
| | | | 1.128; | 72-75; | |
| | | | 168-175, | CK2_PHOSPHO_SITE | |
| | | | 1.101; | 64-67; | |
| | | | 266-272, | PKC_PHOSPHO_SITE | |
| | | | 1.077; | 342-344; | |
| | | | 98-113, | CAMP_PHOSPHO_SITE | |
| | | | 1.132; | 185-188; | |
| | | | 116-131, | CK2_PHOSPHO_SITE | |
| | | | 1.186; | 79-82; | |
| | | | 50-60, 1.117; | PKC_PHOSPHO_SITE | |
| | | | 5-39, 1.125; | 181-183; | |
| | | | 149-165, | CK2_PHOSPHO_SITE | |
| | | | 1.197; | 55-58; | |
| | | | 136-143, | PKC_PHOSPHO_SITE | |
| | | | 1.115; | 312-314; | |
| | | | 300-307, | PKC_PHOSPHO_SITE | |
| | | | 1.107; | 30-32; | |
| | | | 277-295, | CK2_PHOSPHO_SITE | |
| | | | 1.138; | 81-84; MYRISTYL | |
| | | | | 73-78; | |
| | | | | CK2_PHOSPHO_SITE | |
| | | | | 30-33; MYRISTYL | |
| | | | | 191-196; | |
| | | | | PKC_PHOSPHO_SITE | |
| | | | | 245-247; | |
| | | | | CK2_PHOSPHO_SITE | |
| | | | | 321-324; | |
| | | | | CAMP_PHOSPHO_SITE | |
| | | | | 273-276; | |
| | | | | CK2_PHOSPHO_SITE | |
| | | | | 312-315; | |
| | | | | PKC_PHOSPHO_SITE | |
| | | | | 272-274; RGD 260-262; | |
| | | | | CK2_PHOSPHO_SITE | |
| | | | | 15-18; MYRISTYL | |
| | | | | 187-192; | |
| | | | | PKC_PHOSPHO_SITE | |
| | | | | 173-175; | |
| | | | | CAMP_PHOSPHO_SITE | |
| | | | | 318-321; | |
| DEX0449_018.aa.5 | N | 0 - o1-208; | 70-80, 1.145; | CK2_PHOSPHO_SITE | ZINC_FINGER_C2H2_1 |
| | | | 45-50, 1.049; | 111-114; | 74-96; |
| | | | 59-65, 1.037; | CK2_PHOSPHO_SITE | |
| | | | 90-95, 1.044; | 120-123; | |
| | | | 154-169, | PKC_PHOSPHO_SITE | |
| | | | 1.132; | 69-71; | |
| | | | 172-205, | CK2_PHOSPHO_SITE | |
| | | | 1.186; | 135-138; MYRISTYL | |
| | | | 106-116, | 129-134; | |
| | | | 1.117; | CK2_PHOSPHO_SITE | |
| | | | 5-43, 1.154; | 75-78; | |
| | | | | CK2_PHOSPHO_SITE | |
| | | | | 128-131; | |
| | | | | CK2_PHOSPHO_SITE | |
| | | | | 15-18; | |
| | | | | CK2_PHOSPHO_SITE | |
| | | | | 137-140; | |
| DEX0449_018.orf.7 | N | 0 - o1-209; | 115-131, | MYRISTYL 98-103; | ank 179-209; |
| | | | 1.129; | CK2_PHOSPHO_SITE | ANK_REPEAT 179-209; |
| | | | 17-39, 1.155; | 50-53; | ANKYRIN 192-204; |
| | | | 57-80, 1.144; | CK2_PHOSPHO_SITE | ANK_REP_REGION 179-209; |
| | | | 192-203, 1.2; | 107-110; | ANKYRIN 180-192; |
| | | | 181-189, | CK2_PHOSPHO_SITE | ANK 138-168; |
| | | | 1.123; | 162-165; MYRISTYL | ANK 179-208; ank |
| | | | 100-106, | 203-208; | 138-171; |
| | | | 1.067; | CK2_PHOSPHO_SITE | |
| | | | 140-178, | 48-51; | |
| | | | 1.174; | | |
| | | | 4-13, 1.164; | | |
| DEX0449_018.aa.7 | N | 0 - o1-125; | 70-80, 1.145; | CK2_PHOSPHO_SITE | ZINC_FINGER_C2H2_1 |
| | | | 90-95, 1.044; | 121-124; | 74-96; |
| | | | 45-50, 1.049; | CK2_PHOSPHO_SITE | |
| | | | 5-43, 1.154; | 111-114; | |
| | | | 59-65, 1.037; | CK2_PHOSPHO_SITE | |
| | | | 106-116, | 15-18; | |
| | | | 1.117; | CK2_PHOSPHO_SITE | |
| | | | | 120-123; | |
| | | | | PKC_PHOSPHO_SITE | |
| | | | | 69-71; | |
| | | | | CK2_PHOSPHO_SITE | |
| | | | | 75-78; | |
| DEX0449_019.orf.1 | N | 0 - o1-191; | 45-58, 1.139; | PKC_PHOSPHO_SITE | |
| | | | 90-111, | 165-167; | |
| | | | 1.126; | CK2_PHOSPHO_SITE | |
| | | | 63-86, 1.209; | 38-41; | |
| | | | 178-184, | PKC_PHOSPHO_SITE | |
| | | | 1.058; | 184-186; | |
| | | | 115-135, | PKC_PHOSPHO_SITE | |
| | | | 1.185; | 183-185; | |
| | | | 10-37, 1.175; | PKC_PHOSPHO_SITE | |
| | | | 140-154, | 57-59; | |
| | | | 1.113; | PKC_PHOSPHO_SITE | |
| | | | | 89-91; MYRISTYL | |
| | | | | 15-20; MYRISTYL | |
| | | | | 112-117; | |
| | | | | PKC_PHOSPHO_SITE | |
| | | | | 84-86; | |
| DEX0449_019.aa.1 | Y | 0 - o1-130; | 101-115, | CK2_PHOSPHO_SITE | |
| | | | 1.14; | 79-82; AMIDATION | |
| | | | 117-127, | 32-35; | |
| | | | 1.111; | ASN_GLYCOSYLATION | |
| | | | 37-59, 1.165; | 63-66; MYRISTYL | |
| | | | 13-30, 1.165; | 38-43; | |
| | | | 66-71, 1.085; | ASN_GLYCOSYLATION | |
| | | | 4-11, 1.144; | 75-78; MYRISTYL | |
| | | | 75-81, 1.067; | 7-12; | |
| | | | | PKC_PHOSPHO_SITE | |
| | | | | 59-61; MYRISTYL | |
| | | | | 2-7; | |
| DEX0449_020.orf.1 | N | 0 - o1-340; | 216-223, | CK2_PHOSPHO_SITE | aminotran_4 26-325; |
| | | | 1.099; | 223-226; MYRISTYL | sp_Q9BTB6_Q9BTB6_HUMAN |
| | | | 183-191, | 285-290; | 192-296; |
| | | | 1.146; | PKC_PHOSPHO_SITE | AA_TRANSFER_CLASS_4 |
| | | | 127-173, | 267-269; | 212-246; |
| | | | 1.255; | TYR_PHOSPHO_SITE | |
| | | | 269-275, | 322-329; | |
| | | | 1.09; | PKC_PHOSPHO_SITE | |
| | | | 112-123, | 17-19; | |
| | | | 1.195; | CAMP_PHOSPHO_SITE | |
| | | | 315-321, | 18-21; MYRISTYL | |
| | | | 1.08; | 123-128; | |
| | | | 79-102, | CAMP_PHOSPHO_SITE | |
| | | | 1.145; | 19-22; | |
| | | | 226-252, | CK2_PHOSPHO_SITE | |
| | | | 1.213; | 255-258; MYRISTYL | |
| | | | 286-302, | 171-176; | |
| | | | 1.253; | PKC_PHOSPHO_SITE | |
| | | | 23-29, 1.075; | 21-23; | |
| | | | 194-213, | CK2_PHOSPHO_SITE | |
| | | | 1.151; | 248-251; | |
| | | | 259-264, | | |
| | | | 1.066; | | |
| | | | 326-332, | | |
| | | | 1.042; | | |
| | | | 62-68, 1.078; | | |
| DEX0449_020.aa.1 | N | 0 - o1-306; | 281-287, | CK2_PHOSPHO_SITE | sp_Q9BTB6_Q9BTB6_HUMAN |
| | | | 1.08; | 189-192; | 158-262; |
| | | | 28-34, 1.078; | PKC_PHOSPHO_SITE | aminotran_4 1-291; |
| | | | 235-241, | 233-235; | AA_TRANSFER_CLASS_4 |
| | | | 1.09; | TYR_PHOSPHO_SITE | 178-212; |
| | | | 78-89, 1.195; | 288-295; MYRISTYL | |
| | | | 192-218, | 251-256; | |
| | | | 1.213; | CK2_PHOSPHO_SITE | |
| | | | 225-230, | 221-224; MYRISTYL | |
| | | | 1.066; | 137-142; | |
| | | | 93-139, | CK2_PHOSPHO_SITE | |
| | | | 1.255; | 214-217; MYRISTYL | |
| | | | 45-68, 1.145; | 89-94; | |
| | | | 292-298, | | |
| | | | 1.042; | | |
| | | | 149-157, | | |
| | | | 1.146; | | |
| | | | 160-179, | | |
| | | | 1.151; | | |
| | | | 182-189, | | |
| | | | 1.099; | | |
| | | | 252-268, | | |
| | | | 1.253; | | |
| DEX0449_020.orf.2 | N | 0 - o1-485; | 224-247, | MYRISTYL 46-51; | aminotran_4 170-453; |
| | | | 1.145; | MYRISTYL 460-465; | sp_Q9BTB6_Q9BTB6_HUMAN |
| | | | 328-336, | PKC_PHOSPHO_SITE | 337-401; |
| | | | 1.146; | 481-483; | AA_TRANSFER_CLASS_4 |
| | | | 145-152, | ASN_GLYCOSYLATION | 357-391; |
| | | | 1.082; | 178-181; MYRISTYL | |
| | | | 339-358, | 47-52; | |
| | | | 1.151; | CK2_PHOSPHO_SITE | |
| | | | 120-131, | 393-396; MYRISTYL | |
| | | | 1.063; | 55-60; | |
| | | | 207-213, | PKC_PHOSPHO_SITE | |
| | | | 1.078; | 135-137; MYRISTYL | |
| | | | 371-397, | 316-321; MYRISTYL | |
| | | | 1.213; | 43-48; | |
| | | | 272-318, | PKC_PEOSPHO_SITE | |
| | | | 1.255; | 124-126; MYRISTYL | |
| | | | 361-368, | 77-82; | |
| | | | 1.099; | PKC_PHOSPHO_SITE | |
| | | | 176-195, | 56-58; | |
| | | | 1.149; | PKC_PHOSPHO_SITE | |
| | | | 257-268, | 450-452; MYRISTYL | |
| | | | 1.195; | 100-105; | |
| | | | 404-412, | CK2_PHOSPHO_SITE | |
| | | | 1.107; | 450-453; | |
| | | | 464-476, | CK2_PHOSPHO_SITE | |
| | | | 1.259; | 368-371; MYRISTYL | |
| | | | 104-118, | 268-273; | |
| | | | 1.181; | ASN_GLYCOSYLATION | |
| | | | 427-449, | 33-36; MYRISTYL | |
| | | | 1.147; | 76-81; | |
| | | | 84-102, | CK2_PHOSPHO_SITE | |
| | | | 1.102; | 153-156; | |
| | | | 26-33, 1.101; | | |
| | | | 4-18, 1.182; | | |
| DEX0449_020.aa.2 | N | 0 - o1-465; | 11-25, 1.181; | ASN_GLYCOSYLATION | sp_Q9BTB6_Q9BTB6_HUMAN |
| | | | 394-400, | 85-88; MYRISTYL | 382-421; |
| | | | 1.09; | 7-12; | sp_Q9BTB6_Q9BTB6_HUMAN |
| | | | 451-457, | TYR_PHOSPHO_SITE | 244-310; |
| | | | 1.042; | 447-454; | aminotran_4 77-450; |
| | | | 52-59, 1.082; | CK2_PHOSPHO_SITE | AA_TRANSFER_CLASS_4 |
| | | | 164-175, | 314-317; MYRISTYL | 264-298; |
| | | | 1.195; | 175-180; | |
| | | | 319-324, | CK2_PHOSPHO_SITE | |
| | | | 1.061; | 275-278; | |
| | | | 371-389, | CK2_PHOSPHO_SITE | |
| | | | 1.133; | 60-63; | |
| | | | 361-368, | CK2_PHOSPHO_SITE | |
| | | | 1.14; | 300-303; | |
| | | | 246-265, | PKC_PHOSPHO_SITE | |
| | | | 1.151; | 31-33; MYRISTYL | |
| | | | 278-304, | 333-338; MYRISTYL | |
| | | | 1.213; | 323-328; MYRISTYL | |
| | | | 114-120, | 410-415; | |
| | | | 1.078; | PKC_PHOSPHO_SITE | |
| | | | 4-9, 1.069; | 42-44; MYRISTYL | |
| | | | 179-225, | 223-228; | |
| | | | 1.255; | PKC_PHOSPHO_SITE | |
| | | | 235-243, | 392-394; | |
| | | | 1.146; | CK2_PHOSPHO_SITE | |
| | | | 411-427, | 307-310; | |
| | | | 1.253; | | |
| | | | 440-446, | | |
| | | | 1.08; | | |
| | | | 83-102, | | |
| | | | 1.149; | | |
| | | | 27-38, 1.063; | | |
| | | | 334-357, | | |
| | | | 1.22; | | |
| | | | 268-275, | | |
| | | | 1.099; | | |
| | | | 131-154, | | |
| | | | 1.145; | | |
| DEX0449_021.orf.1 | N | 0 - o1-74; | | ASN_GLYCOSYLATION | |
| | | | | 7-10; MYRISTYL 8-13; | |
| | | | | PKC_PHOSPHO_SITE | |
| | | | | 11-13; | |
| | | | | PKC_PHOSPHO_SITE | |
| | | | | 13-15; | |
| | | | | CK2_PHOSPHO_SITE | |
| | | | | 1-4; | |
| | | | | CAMP_PHOSPHO_SITE | |
| | | | | 17-20; MYRISTYL | |
| | | | | 32-37; | |
| | | | | ASN_GLYCOSYLATION | |
| | | | | 10-13; | |
| | | | | PKC_PHOSPHO_SITE | |
| | | | | 39-41; | |
| | | | | PKC_PHOSPHO_SITE | |
| | | | | 1-3; | |
| | | | | CK2_PHOSPHO_SITE | |
| | | | | 11-14; | |
| | | | | ASN_GLYCOSYLATION | |
| | | | | 9-12; MYRISTYL 3-8; | |
| | | | | PKC_PHOSPHO_SITE | |
| | | | | 12-14; | |
| DEX0449_021.aa.1 | N | 1 - i1-12; | 50-60, 1.136; | | |
| | | tm13-32; | 4-47, 1.195; | | |
| | | o33-63; | | | |
| DEX0449_022.aa.1 | N | 0 - o1-313; | 119-137, | PKC_PHOSPHO_SITE | Fe_hyd_lg_C 79-299; |
| | | | 1.178; | 12-14; MYRISTYL | |
| | | | 217-247, | 246-251; | |
| | | | 1.231; | CK2_PHOSPHO_SITE | |
| | | | 76-83, 1.102; | 7-10; MYRISTYL | |
| | | | 24-30, 1.066; | 65-70; | |
| | | | 267-282, | PKC_PHOSPHO_SITE | |
| | | | 1.131; | 7-9; | |
| | | | 88-116, | CK2_PHOSPHO_SITE | |
| | | | 1.315; | 143-146; | |
| | | | 250-257, | PKC_PHOSPHO_SITE | |
| | | | 1.128; | 118-120; | |
| | | | 294-310, | PKC_PHOSPHO_SITE | |
| | | | 1.104; | 269-271; | |
| | | | 149-155, | CK2_PHOSPHO_SITE | |
| | | | 1.04; | 15-18; | |
| | | | 165-210, | ASN_GLYCOSYLATION | |
| | | | 1.137; | 22-25; | |
| | | | 139-147, | CK2_PHOSPHO_SITE | |
| | | | 1.071; | 255-258; | |
| | | | 65-71; 1.081; | CK2_PHOSPHO_SITE | |
| | | | 40-59; 1.204; | 159-162; | |
| | | | | PKC_PHOSPHO_SITE | |
| | | | | 147-149; | |
| | | | | CK2_PHOSPHO_SITE | |
| | | | | 113-116; | |
| | | | | PKC_PHOSPHO_SITE | |
| | | | | 193-195; | |
| | | | | CK2_PHOSPHO_SITE | |
| | | | | 147-150; | |
| | | | | ASN_GLYCOSYLATION | |
| | | | | 111-114; | |
| | | | | CK2_PHOSPHO_SITE | |
| | | | | 269-272; | |
| | | | | PKC_PHOSPHO_SITE | |
| | | | | 88-90; MYRISTYL | |
| | | | | 289-294; | |
| | | | | PKC_PHOSPHO_SITE | |
| | | | | 292-294; | |
| | | | | CK2_PHOSPHO_SITE | |
| | | | | 61-64; | |
| DEX0449_022.orf.2 | N | 0 - o1-395; | 345-392, | CK2_PHOSPHO_SITE | Fe_hyd_lg_C 259-395; |
| | | | 1.137; | 323-326; | CLOACIN 159-180; |
| | | | 87-118, | PKC_PHOSPHO_SITE | CLOACIN 270-289; |
| | | | 1.108; | 78-80; | PRO_RICH 18-105; |
| | | | 245-251, | PKC_PHOSPHO_SITE | |
| | | | 1.081; | 298-300; | |
| | | | 256-263, | PKC_PHOSPHO_SITE | |
| | | | 1.102; | 46-48; MYRISTYL | |
| | | | 220-239, | 110-115; MYRISTYL | |
| | | | 1.204; | 45-50; MYRISTYL | |
| | | | 122-143, | 245-250; | |
| | | | 1.17; | CK2_PHOSPHO_SITE | |
| | | | 319-327, | 8-11; | |
| | | | 1.071; | CAMP_PHOSPHO_SITE | |
| | | | 268-296, | 5-8; | |
| | | | 1.315; | ASN_GLYCOSYLATION | |
| | | | 39-58, 1.105; | 291-294; | |
| | | | 26-33, 1.048; | CK2_PHOSPHO_SITE | |
| | | | 171-186, | 241-244; | |
| | | | 1.11; | CK2_PHOSPHO_SITE | |
| | | | 204-210, | 146-149; | |
| | | | 1.066; | CAMP_PHOSPHO_SITE | |
| | | | 157-169, | 80-83; | |
| | | | 1.174; | CK2_PHOSPHO_SITE | |
| | | | 60-65, 1.04; | 83-86; | |
| | | | 299-317, | CK2_PHOSPHO_SITE | |
| | | | 1.178; | 195-198; | |
| | | | 329-335, | CK2_PHOSPHO_SITE | |
| | | | 1.04; | 187-190; | |
| | | | | CK2_PHOSPHO_SITE | |
| | | | | 35-38; | |
| | | | | PKC_PHOSPHO_SITE | |
| | | | | 192-194; | |
| | | | | PKC_PHOSPHO_SITE | |
| | | | | 268-270; | |
| | | | | CK2_PHOSPHO_SITE | |
| | | | | 293-296; MYRISTYL | |
| | | | | 141-146; | |
| | | | | ASN_GLYCOSYLATION | |
| | | | | 202-205; | |
| | | | | CK2_PHOSPHO_SITE | |
| | | | | 339-342; | |
| | | | | PKC_PHOSPHO_SITE | |
| | | | | 373-375; MYRISTYL | |
| | | | | 159-164; MYRISTYL | |
| | | | | 173-178; | |
| | | | | CK2_PHOSPHO_SITE | |
| | | | | 327-330; | |
| | | | | PKC_PHOSPHO_SITE | |
| | | | | 327-329; | |
| | | | | PKC_PHOSPHO_SITE | |
| | | | | 187-199; | |
| DEX0449_022.aa.2 | N | 0 - o1-285; | 233-241, | CK2_PHOSPHO_SITE | Fe_hyd_lg_C 1-214; |
| | | | 1.12; | 84-87; | Fe_hyd_SSU 220-275; |
| | | | 193-207, | TYR_PHOSPHO_SITE | |
| | | | 1.205; | 227-233; | |
| | | | 125-134, | PKC_PHOSPHO_SITE | |
| | | | 1.092; | 260-262; MYRISTYL | |
| | | | 166-176, | 31-36; | |
| | | | 1.158; | PKC_PHOSPHO_SITE | |
| | | | 184-189, | 148-150; MYRISTYL | |
| | | | 1.045; | 75-80; | |
| | | | 46-76, 1.231; | PKC_PHOSPHO_SITE | |
| | | | 4-10, 1.133; | 98-100; MYRISTYL | |
| | | | 145-150, | 205-210; MYRISTYL | |
| | | | 1.073; | 10-15; | |
| | | | 79-86, 1.128; | CK2_PHOSPHO_SITE | |
| | | | 222-227, | 35-38; | |
| | | | 1.076; | CK2_PHOSPHO_SITE | |
| | | | 96-110, | 117-120; MYRISTYL | |
| | | | 1.092; | 206-211; | |
| | | | 244-253, | CK2_PHOSPHO_SITE | |
| | | | 1.118; | 98-101; | |
| | | | 38-44, 1.11; | | |
| | | | 263-271, | | |
| | | | 1.105; | | |
| DEX0449_023.orf.1 | N | 0 - o1-170; | 133-143, | PKC_PHOSPHO_SITE | |
| | | | 1.109; | 161-163; MYRISTYL | |
| | | | 50-73, 1.14; | 143-148; | |
| | | | 81-115, | PKC_PHOSPHO_SITE | |
| | | | 1.154; | 118-120; | |
| | | | 36-48, 1.177; | PKC_PHOSPHO_SITE | |
| | | | 12-30, 1.165; | 119-121; MYRISTYL | |
| | | | 148-153, | 127-132; | |
| | | | 1.079; | CAMP_PHOSPHO_SITE | |
| | | | | 129-132; | |
| | | | | PKC_PHOSPHO_SITE | |
| | | | | 128-130; | |
| | | | | PKC_PHOSPHO_SITE | |
| | | | | 50-52; | |
| DEX0449_023.aa.1 | N | 0 - i1-159; | 25-37, 1.177; | PKC_PHOSPHO_SITE | |
| | | | 122-132, | 117-119; | |
| | | | 1.109; | PKC_PHOSPHO_SITE | |
| | | | 39-62, 1.14; | 107-109; | |
| | | | 137-142, | PKC_PHOSPHO_SITE | |
| | | | 1.079; | 150-152; MYRISTYL | |
| | | | 70-104, | 132-137; | |
| | | | 1.154; | CAMP_PHOSPHO_SITE | |
| | | | 4-19, 1.165; | 118-121; | |
| | | | | PKC_PHOSPHO_SITE | |
| | | | | 39-41; | |
| | | | | PKC_PHOSPHO_SITE | |
| | | | | 108-110; MYRISTYL | |
| | | | | 116-121; | |
| DEX0449_023.orf.2 | N | 0 - o1-170; | 81-115, | PKC_PHOSPHO_SITE | |
| | | | 1.154; | 161-163; | |
| | | | 133-143, | PKC_PHOSPHO_SITE | |
| | | | 1.109; | 50-52; MYRISTYL | |
| | | | 12-30, 1.165; | 143-148; | |
| | | | 148-153, | PKC_PHOSPHO_SITE | |
| | | | 1.079; | 119-121; | |
| | | | 50-73, 1.14; | CAMP_PHOSPHO_SITE | |
| | | | 36-48, 1.177; | 129-132; | |
| | | | | PKC_PHOSPHO_SITE | |
| | | | | 128-130; | |
| | | | | PKC_PHOSPHO_SITE | |
| | | | | 118-120; MYRISTYL | |
| | | | | 127-132; | |
| DEX0449_024.orf.1 | N | 0 - o1-255; | 136-145, | PKC_PHOSPHO_SITE | |
| | | | 1.106; | 150-152; MYRISTYL | |
| | | | 228-249, | 228-233; MYRISTYL | |
| | | | 1.154; | 225-230; | |
| | | | 182-192, | CK2_PHOSPHO_SITE | |
| | | | 1.188; | 241-244; | |
| | | | 4-20, 1.125; | CK2_PHOSPHO_SITE | |
| | | | 204-210, | 250-253; | |
| | | | 1.043; | PKC_PHOSPHO_SITE | |
| | | | 213-224, | 24-26; MYRISTYL | |
| | | | 1.184; | 234-239; | |
| | | | 84-90, 1.092; | PKC_PHOSPHO_SITE | |
| | | | 28-78, 1.171; | 92-94; MYRISTYL | |
| | | | 117-123, | 170-175; | |
| | | | 1.077; | PKC_PHOSPHO_SITE | |
| | | | 106-115, | 81-83; MYRISTYL | |
| | | | 1.076; | 55-60; | |
| | | | | CK2_PHOSPHO_SITE | |
| | | | | 200-203; | |
| | | | | PKC_PHOSPHO_SITE | |
| | | | | 166-168; | |
| | | | | CK2_PHOSPHO_SITE | |
| | | | | 92-95; | |
| | | | | CK2_PHOSPHO_SITE | |
| | | | | 24-27; MYRISTYL | |
| | | | | 210-215; MYRISTYL | |
| | | | | 230-235; | |
| | | | | ASN_GLYCOSYLATION | |
| | | | | 98-101; | |
| DEX0449_024.aa.1 | N | 0 - o1-147; | 35-44, 1.174; | MYRISTYL 65-70; | CSD 62-129; CSP 64-129; |
| | | | 109-115, | CK2_PHOSPHO_SITE | COLDSHOCK 65-80; |
| | | | 1.09; | 93-96 | COLDSHOCK 86-95; |
| | | | 97-105, | PKC_PHOSPHO_SITE | |
| | | | 1.083; | 54-56; | |
| | | | 121-134, | CK2_PHOSPHO_SITE | |
| | | | 1.19; 5-23, | 80-83; | |
| | | | 1.121; | PKC_PHOSPHO_SITE | |
| | | | 87-94, 1.123; | 23-25; | |
| | | | 52-74, 1.216; | CK2_PHOSPHO_SITE | |
| | | | | 135-138; | |
| | | | | PKC_PHOSPHO_SITE | |
| | | | | 108-110; | |
| | | | | PKC_PHOSPHO_SITE | |
| | | | | 45-47; | |
| DEX0449_024.orf.2 | N | 0 - o1-255; | 213-224, | CK2_PHOSPHO_SITE | |
| | | | 1.184; | 200-203; | |
| | | | 182-192, | PKC_PHOSPHO_SITE | |
| | | | 1.188; | 24-26; | |
| | | | 84-90, 1.092; | CK2_PHOSPHO_SITE | |
| | | | 117-123, | 241-244; | |
| | | | 1.077; | PKC_PHOSPHO_SITE | |
| | | | 28-78, 1.171; | 150-152; | |
| | | | 136-145, | CK2_PHOSPHO_SITE | |
| | | | 1.106; | 24-27; MYRISTYL | |
| | | | 4-20, 1.125; | 225-230; MYRISTYL | |
| | | | 204-210, | 230-235; MYRISTYL | |
| | | | 1.043; | 55-60; MYRISTYL | |
| | | | 228-249, | 234-239; MYRISTYL | |
| | | | 1.154; | 170-175; | |
| | | | 106-115, | PKC_PHOSPHO_SITE | |
| | | | 1.076; | 92-94; | |
| | | | | PKC_PHOSPHO_SITE | |
| | | | | 166-168; | |
| | | | | CK2_PHOSPHO_SITE | |
| | | | | 250-253; MYRISTYL | |
| | | | | 228-233; | |
| | | | | ASN_GLYCOSYLATION | |
| | | | | 98-101; | |
| | | | | PKC_PHOSPHO_SITE | |
| | | | | 81-83; | |
| | | | | CK2_PHOSPHO_SITE | |
| | | | | 92-95; MYRISTYL | |
| | | | | 210-215; | |
| DEX0449_024.orf.3 | N | 0 - o1-243; | 94-103, | MYRISTYL 9-14; | |
| | | | 1.076; | CK2_PHOSPHO_SITE | |
| | | | 192-198, | 238-241; | |
| | | | 1.043; | CK2_PHOSPHO_SITE | |
| | | | 170-180, | 229-232; MYRISTYL | |
| | | | 1.188; | 216-221; | |
| | | | 216-237, | CK2_PHOSPHO_SITE | |
| | | | 1.154; | 188-191; MYRISTYL | |
| | | | 16-66, 1.171; | 222-227; MYRISTYL | |
| | | | 72-78, 1.092; | 218-223; MYRISTYL | |
| | | | 201-212, | 8-13; | |
| | | | 1.184; | PKC_PHOSPHO_SITE | |
| | | | 124-133, | 69-71; MYRISTYL | |
| | | | 1.106; | 213-218; | |
| | | | 105-111, | PKC_PHOSPHO_SITE | |
| | | | 1.077; | 154-156; MYRISTYL | |
| | | | | 43-48; | |
| | | | | PKC_PHOSPHO_SITE | |
| | | | | 138-140; MYRISTYL | |
| | | | | 158-163; | |
| | | | | PKC_PHOSPHO_SITE | |
| | | | | 80-82; | |
| | | | | ASN_GLYCOSYLATION | |
| | | | | 86-89; | |
| | | | | CK2_PHOSPHO_SITE | |
| | | | | 80-83; | |
| | | | | PKC_PHOSPHO_SITE | |
| | | | | 3-5; MYRISTYL | |
| | | | | 198-203; | |
| DEX0449_024.aa.3 | N | 0 - o1-147; | 5-23, 1.121; | PKC_PHOSPHO_SITE | CSP 64-129; |
| | | | 52-74, 1.216; | 54-56; | COLDSHOCK 65-80; |
| | | | 121-134, | CK2_PHOSPHO_SITE | COLDSHOCK 86-95; |
| | | | 1.19; | 80-83; | CSD 62-129; |
| | | | 109-115, | PKC_PHOSPHO_SITE | |
| | | | 1.09; | 45-47; | |
| | | | 35-44, 1.174; | CK2_PHOSPHO_SITE | |
| | | | 97-105, | 135-138; | |
| | | | 1.083; | PKC_PHOSPHO_SITE | |
| | | | 87-94, 1.123; | 23-25; | |
| | | | | CK2_PHOSPHO_SITE | |
| | | | | 93-96; MYRISTYL | |
| | | | | 65-70; | |
| | | | | PKC_PHOSPHO_SITE | |
| | | | | 108-110; | |
| DEX0449_024.orf.4 | N | 0 - o1-202; | 129-139, | MYRISTYL 181-186; | |
| | | | 1.188; | MYRISTYL 175-180; | |
| | | | 160-171, | ASN_GLYCOSYLATION | |
| | | | 1.184; | 45-48; | |
| | | | 23-37, 1.092; | PKC_PHOSPHO_SITE | |
| | | | 151-157, | 29-31; MYRISTYL | |
| | | | 1.043; | 172-177; | |
| | | | 53-62, 1.076; | CK2_PHOSPHO_SITE | |
| | | | 175-196, | 188-191; | |
| | | | 1.154; | PKC_PHOSPHO_SITE | |
| | | | 64-70, 1.077; | 39-41; MYRISTYL | |
| | | | 11-17, 1.151; | 117-122; MYRISTYL | |
| | | | 83-92, 1.106; | 2-7; | |
| | | | | PKC_PHOSPHO_SITE | |
| | | | | 113-115; | |
| | | | | CK2_PHOSPHO_SITE | |
| | | | | 39-42; | |
| | | | | CK2_PHOSPHO_SITE | |
| | | | | 197-200; | |
| | | | | CK2_PHOSPHO_SITE | |
| | | | | 147-150; MYRISTYL | |
| | | | | 157-162; | |
| | | | | PKC_PHOSPHO_SITE | |
| | | | | 97-99; MYRISTYL | |
| | | | | 177-182; | |
| DEX0449_024.aa.4 | N | 0 - o1-138; | 108-119, | CK2_PHOSPHO_SITE | |
| | | | 1.184; | 95-98; MYRISTYL | |
| | | | 99-105, | 105-110; | |
| | | | 1.043; | PKC_PHOSPHO_SITE | |
| | | | 123-135, | 45-47; MYRISTYL | |
| | | | 1.126; | 123-128; MYRISTYL | |
| | | | 4-10, 1.076; | 120-125; | |
| | | | 12-18, 1.077; | PKC_PHOSPHO_SITE | |
| | | | 31-40, 1.106; | 61-63; MYRISTYL | |
| | | | 77-87, 1.188; | 65-70; | |
| DEX0449_024.aa.5 | N | 0 - o1-185; | 124-134, | CK2_PHOSPHO_SITE | |
| | | | 1.188; | 142-145; MYRISTYL | |
| | | | 78-87, 1.106; | 170-175; | |
| | | | 155-166, | CK2_PHOSPHO_SITE | |
| | | | 1.184; | 34-37; | |
| | | | 59-65, 1.077; | PKC_PHOSPHO_SITE | |
| | | | 48-57, 1.076; | 92-94; | |
| | | | 170-182, | PKC_PHOSPHO_SITE | |
| | | | 1.126; | 34-36; MYRISTYL | |
| | | | 146-152, | 152-157; | |
| | | | 1.043; | PKC_PHOSPHO_SITE | |
| | | | 5-23, 1.121; | 23-25; | |
| | | | | PKC_PHOSPHO_SITE | |
| | | | | 108-110; MYRISTYL | |
| | | | | 112-117; MYRISTYL | |
| | | | | 167-172; | |
| | | | | ASN_GLYCOSYLATION | |
| | | | | 40-43; | |
| DEX0449_024.orf.5 | N | 0 - o1-265; | 214-220, | PKC_PHOSPHO_SITE | |
| | | | 1.043; | 102-104; | |
| | | | 4-14, 1.143; | PKC_PHOSPHO_SITE | |
| | | | 223-234, | 176-178; MYRISTYL | |
| | | | 1.184; | 27-32; | |
| | | | 146-155, | PKC_PHOSPHO_SITE | |
| | | | 1.106; | 91-93; MYRISTYL | |
| | | | 127-133, | 235-240; MYRISTYL | |
| | | | 1.077; | 31-36; | |
| | | | 116-125, | PKC_PHOSPHO_SITE | |
| | | | 1.076; | 51-53; MYRISTYL | |
| | | | 73-91, 1.121; | 238-243; | |
| | | | 192-202, | PKC_PHOSPHO_SITE | |
| | | | 1.188; | 160-162; | |
| | | | 57-65, 1.074; | CK2_PHOSPHO_SITE | |
| | | | 238-259, | 260-263; MYRISTYL | |
| | | | 1.154; | 180-185; MYRISTYL | |
| | | | 18-27, 1.167; | 240-245; | |
| | | | | CK2_PHOSPHO_SITE | |
| | | | | 102-105; MYRISTYL | |
| | | | | 42-47; | |
| | | | | CK2_PHOSPHO_SITE | |
| | | | | 210-213; MYRISTYL | |
| | | | | 220-225; | |
| | | | | CK2_PHOSPHO_SITE | |
| | | | | 251-254; MYRISTYL | |
| | | | | 244-249; | |
| | | | | PKC_PHOSPHO_SITE | |
| | | | | 15-17; | |
| | | | | ASN_GLYCOSYLATION | |
| | | | | 108-111; | |
| DEX0449_024.aa.6 | Y | 0 - o1-201; | 42-56, 1.099; | MYRISTYL 95-100; | ER_TARGET 198-201; |
| | | | 33-39, 1.074; | PKC_PHOSPHO_SITE | |
| | | | 58-181, | 30-32; | |
| | | | 1.229; | CK2_PHOSPHO_SITE | |
| | | | 14-31, 1.197; | 127-130; MYRISTYL | |
| | | | | 143-148; | |
| | | | | CK2_PHOSPHO_SITE | |
| | | | | 10-13; | |
| | | | | PKC_PHOSPHO_SITE | |
| | | | | 163-165; | |
| | | | | PKC_PHOSPHO_SITE | |
| | | | | 10-12; | |
| | | | | CK2_PHOSPHO_SITE | |
| | | | | 74-77; MYRISTYL | |
| | | | | 67-72; | |
| | | | | PKC_PHOSPHO_SITE | |
| | | | | 181-183; | |
| DEX0449_025.aa.1 | N | 0 - o1-159; | 149-155, | CK2_PHOSPHO_SITE | |
| | | | 1.129; | 138-141; | |
| | | | 17-32, 1.132; | CK2_PHOSPHO_SITE | |
| | | | 109-136, | 41-44; | |
| | | | 1.177; | PKC_PHOSPHO_SITE | |
| | | | 74-88, 1.162; | 85-87; MYRISTYL | |
| | | | 49-67, 1.112; | 144-149; | |
| | | | 99-107, | CK2_PHOSPHO_SITE | |
| | | | 1.157; | 91-94; | |
| | | | 34-43, 1.178; | PKC_PHOSPHO_SITE | |
| | | | | 52-54; | |
| | | | | CK2_PHOSPHO_SITE | |
| | | | | 108-111; | |
| | | | | PKC_PHOSPHO_SITE | |
| | | | | 29-31; | |
| | | | | CK2_PHOSPHO_SITE | |
| | | | | 143-146; | |
| DEX0449_025.aa.2 | N | 1 - i1-36; | 35-44, 1.203; | CK2_PHOSPHO_SITE | |
| | | tm37-54; | 4-10, 1.103; | 77-80; | |
| | | o55-128; | 118-124, | CK2_PHOSPHO_SITE | |
| | | | 1.129; | 60-63; | |
| | | | 48-56, 1.102; | ASN_GLYCOSYLATION | |
| | | | 68-76, 1.157; | 44-47; MYRISTYL | |
| | | | 78-105, | 113-118; | |
| | | | 1.177; | CK2_PHOSPHO_SITE | |
| | | | | 107-110; | |
| | | | | PKC_PHOSPHO_SITE | |
| | | | | 57-59; | |
| | | | | ASN_GLYCOSYLATION | |
| | | | | 12-15; | |
| | | | | CK2_PHOSPEO_SITE | |
| | | | | 112-115; | |
| | | | | PKC_PHOSPHO_SITE | |
| | | | | 13-15; | |
| DEX0449_026.aa.1 | N | 0 - o1-224; | 63-74, 1.101; | CK2_PHOSPHO_SITE | SH2DOMAIN 113-127; |
| | | | 148-166, | 119-122; | SH2 113-196; SH2 |
| | | | 1.202; | CAMP_PHOSPHO_SITE | 111-202; PRO_RICH |
| | | | 43-49, 1.048; | 143-146; | 19-102; SH2 113-221; |
| | | | 186-195, | CK2_PHOSPHO_SITE | sp_Q13094_LCP2_HUMAN |
| | | | 1.118; | 188-191; | 113-207; |
| | | | 135-141, | ASN_GLYCOSYLATION | SH2DOMAIN 185-199; |
| | | | 1.07; | 59-62; | SH2DOMAIN 133-143; |
| | | | 16-28, 1.137; | PKC_PHOSPHO_SITE | |
| | | | 124-129, | 77-79; | |
| | | | 1.03; | CK2_PHOSPHO_SITE | |
| | | | 114-120, | 101-104; | |
| | | | 1.096; | PKC_PHOSPHO_SITE | |
| | | | 170-178, | 141-143; | |
| | | | 1.135; | CK2_PHOSPHO_SITE | |
| | | | 198-205, | 108-111; | |
| | | | 1.103; | PKC_PHOSPHO_SITE | |
| | | | 90-96, 1.08; | 37-39; | |
| | | | 212-221, | TYR_PHOSPHO_SITE | |
| | | | 1.109; | 166-174; | |
| | | | | PKC_PHOSPHO_SITE | |
| | | | | 142-144; | |
| DEX0449_026.aa.2 | Y | 0 - o1-230; | 176-184, | TYR_PHOSPHO_SITE | SH2DOMAIN 119-133; |
| | | | 1.135; | 172-180; | PRO_RICH 25-108; |
| | | | 154-172, | PKC_PHOSPHO_SITE | sp_Q13094_LCP2_HUMAN |
| | | | 1.202; | 148-150; | 119-213; SH2 119-227; |
| | | | 120-126, | PKC_PHOSPHO_SITE | SH2 DOMAIN 191-205; |
| | | | 1.096; | 43-45; | SH2 117-208; |
| | | | 49-55, 1.048; | CK2_PHOSPHO_SITE | SH2 119-202; |
| | | | 218-227, | 114-117; | SH2DOMAIN 139-149; |
| | | | 1.109; | PKC_PHOSPHO_SITE | |
| | | | 204-211, | 83-85; MYRISTYL | |
| | | | 1.103; | 8-13; | |
| | | | 141-147, | PKC_PHOSPHO_SITE | |
| | | | 1.07; | 147-149; | |
| | | | 69-80, 1.101; | CAMP_PHOSPHO_SITE | |
| | | | 8-34, 1.204; | 149-152; | |
| | | | 130-135, | CK2_PHOSPHO_SITE | |
| | | | 1.03; | 107-110; | |
| | | | 192-201, | CK2_PHOSPHO_SITE | |
| | | | 1.118; | 194-197; | |
| | | | 96-102, 1.08; | CK2_PHOSPHO_SITE | |
| | | | | 125-128; | |
| | | | | ASN_GLYCOSYLATION | |
| | | | | 65-68; | |
| DEX0449_026.orf.2 | Y | 0 - o1-225; | 91-97, 1.08; | PKC_PHOSPHO_SITE | SH2 114-197; SH2 |
| | | | 136-142, | 78-80; | 114-222; |
| | | | 1.07; | PKC_PHOSPHO_SITE | sp_Q13094_LCP2_HUMAN |
| | | | 149-167, | 38-40; | 114-208; PRO_RICH |
| | | | 1.202; | CK2_PHOSPHO_SITE | 20-103; SH2 112-203; |
| | | | 213-222, | 189-192; | SH2DOMAIN 186-200; |
| | | | 1.109; | CK2_PHOSPHO_SITE | SH2DOMAIN 114-128; |
| | | | 187-196, | 102-105; | SH2DOMAIN 134-144; |
| | | | 1.118; | PKC_PHOSPHO_SITE | |
| | | | 64-75, 1.101; | 142-144; | |
| | | | 125-130, | CK2_PHOSPHO_SITE | |
| | | | 1.03; | 120-123; | |
| | | | 171-179, | ASN_GLYCOSYLATION | |
| | | | 1.135; | 60-63; | |
| | | | 199-206, | PKC_PHOSPHO_SITE | |
| | | | 1.103; | 143-145; | |
| | | | 44-50, 1.048; | CK2_PHOSPHO_SITE | |
| | | | 4-29, 1.249; | 109-112; | |
| | | | 115-121, | CAMP_PHOSPHO_SITE | |
| | | | 1.096; | 144-147; | |
| | | | | TYR_PHOSPHO_SITE | |
| | | | | 167-175; | |
| DEX0449_027.aa.1 | N | 0 - o1-1085; | 1028-1040, | CK2_PHOSPHO_SITE | LON 123-368; |
| | | | 1.222; | 80-83; MYRISTYL | LON_SER 978-986; |
| | | | 860-866, | 99-104; MYRISTYL | ENDOLAPTASE 1005-1024; |
| | | | 1.065; | 98-103; | GLY_RICH 56-106; |
| | | | 684-694, | CK2_PHOSPHO_SITE | LON 123-368; |
| | | | 1.255; | 181-184; MYRISTYL | AAA 515-786; |
| | | | 13-34, 1.134; | 335-340; MYRISTYL | ENDOLAPTASE 1028-1046; |
| | | | 660-676, | 95-100; MYRISTYL | ATP_GTP_A |
| | | | 1.101; | 512-517; MYRISTYL | 523-530; lon 125-1073; |
| | | | 1008-1020, | 96-101; MYRISTYL | ENDOLAPTASE |
| | | | 1.107; | 683-688; | 975-994; |
| | | | 176-185, | CK2_PHOSPHO_SITE | DISEASERSIST 579-593; |
| | | | 1.108; | 116-119; MYRISTYL | DISEASERSIST |
| | | | 784-811, | 42-47; | 518-533; |
| | | | 1.127; | CK2_PHOSPHO_SITE | ENDOLAPTASE 523-542; |
| | | | 720-736, | 580-583; MYRISTYL | ENDOLAPTASE |
| | | | 1.173; | 889-894; | 888-904; AAA 518-839; |
| | | | 205-223, | ASN_GLYCOSYLATION | |
| | | | 1.113; | 766-769; | |
| | | | 981-994, | TYR_PHOSPHO_SITE | |
| | | | 1.16; | 323-330; MYRISTYL | |
| | | | 36-43, 1.066; | 656-661; | |
| | | | 426-450, | CK2_PHOSPHO_SITE | |
| | | | 1.214; | 299-302; | |
| | | | 613-624, | PKC_PHOSPHO_SITE | |
| | | | 1.087; | 390-392; MYRISTYL | |
| | | | 957-973, | 679-684; MYRISTYL | |
| | | | 1.166; | 12-17; MYRISTYL | |
| | | | 585-592, | 738-743; | |
| | | | 1.129; | CAMP_PHOSPHO_SITE | |
| | | | 311-317, | 236-239; | |
| | | | 1.111; | ASN_GLYCOSYLATION | |
| | | | 357-369, | 456-459; | |
| | | | 1.131; | PKC_PHOSPHO_SITE | |
| | | | 286-309, | 680-682; MYRISTYL | |
| | | | 1.102; | 63-68; MYRISTYL | |
| | | | 704-713, | 76-81; | |
| | | | 1.132; | ASN_GLYCOSYLATION | |
| | | | 117-129, | 783-786; | |
| | | | 1.172; | PKC_PHOSPHO_SITE | |
| | | | 884-894, | 939-941; MYRISTYL | |
| | | | 1.151; | 93-98; | |
| | | | 747-766, | PKC_PHOSPHO_SITE | |
| | | | 1.195; | 1012-1014; | |
| | | | 251-257, | MYRISTYL 634-639; | |
| | | | 1.062; | PKC_PHOSPHO_SITE | |
| | | | 639-648, | 975-977; MYRISTYL | |
| | | | 1.073; | 89-94; | |
| | | | 516-530, | CK2_PHOSPHO_SITE | |
| | | | 1.143; | 975-978; | |
| | | | 131-144, | AMIDATION 241-244; | |
| | | | 1.103; | PKC_PHOSPHO_SITE | |
| | | | 602-608, | 72-74; | |
| | | | 1.102; | CK2_PHOSPHO_SITE | |
| | | | 264-283, | 339-342; | |
| | | | 1.144; | ASN_GLYCOSYLATION | |
| | | | 815-833, | 450-453; | |
| | | | 1.167; | PKC_PHOSPHO_SITE | |
| | | | 738-745, | 299-301; | |
| | | | 1.081; | CK2_PHOSPHO_SITE | |
| | | | 1056-1072, | 770-773; MYRISTYL | |
| | | | 1.154; | 893-898; MYRISTYL | |
| | | | 941-954, | 675-680; | |
| | | | 1.059; | PKC_PHOSPHO_SITE | |
| | | | 925-934, | 251-253; MYRISTYL | |
| | | | 1.076; | 734-739; MYRISTYL | |
| | | | 321-333, | 744-749; MYRISTYL | |
| | | | 1.112; | 735-740; | |
| | | | 480-489, | PKC_PHOSPHO_SITE | |
| | | | 1.102; | 239-241; MYRISTYL | |
| | | | 869-880, | 654-659; MYRISTYL | |
| | | | 1.117; | 77-82; MYRISTYL | |
| | | | 146-169, | 81-86; MYRISTYL | |
| | | | 1.172; | 809-814; MYRISTYL | |
| | | | 533-539, | 526-531; | |
| | | | 1.047; | ASN_GLYCOSYLATION | |
| | | | 499-510, | 174-177; | |
| | | | 1.138; | PKC_PHOSPHO_SITE | |
| | | | 1046-1054, | 909-911; MYRISTYL | |
| | | | 1.093; | 446-451; MYRISTYL | |
| | | | 571-579, | 637-642; MYRISTYL | |
| | | | 1.12; | 567-572; | |
| | | | 462-468, | | |
| | | | 1.049; | | |
| | | | 45-53, 1.059; | | |
| | | | 835-858, | | |
| | | | 1.106; | | |
| | | | 563-569, | | |
| | | | 1.04; | | |
| | | | 372-378, | | |
| | | | 1.057; | | |
| | | | 903-909, | | |
| | | | 1.107; | | |
| | | | 106-112, | | |
| | | | 1.104; | | |
| | | | 392-406, | | |
| | | | 1.113; | | |
| | | | 5-11, 1.071; | | |
| DEX0449_027.orf.1 | N | 0 - o1-668; | 444-458, | CK2_PHOSPHO_SITE | GLY_RICH 108-158; |
| | | | 1.113; | 132-135; MYRISTYL | DISEASERSIST 570-585; |
| | | | 615-621, | 387-392; MYRISTYL | DISEASERSIST |
| | | | 1.04; | 145-150; | 631-645; ATP_GTP_A |
| | | | 41-48, 1.124; | AMIDATION 293-296; | 575-582; AAA 567-665; |
| | | | 183-196, | ASN_GLYCOSYLATION | LON 175-420; |
| | | | 1.103; | 226-229; MYRISTYL | LON 175-420; |
| | | | 532-541, | 39-44; MYRISTYL | |
| | | | 1.102; | 141-146; | |
| | | | 585-591, | PKC_PHOSPHO_SITE | |
| | | | 1.047; | 303-305; | |
| | | | 478-502, | CK2_PHOSPHO_SITE | |
| | | | 1.214; | 632-635; | |
| | | | 623-631, | CK2_PHOSPHO_SITE | |
| | | | 1.12; | 233-236; MYRISTYL | |
| | | | 363-369, | 133-138; | |
| | | | 1.111; | CK2_PHOSPHO_SITE | |
| | | | 424-430, | 391-394; | |
| | | | 1.057; | CK2_PHOSPHO_SITE | |
| | | | 88-95, 1.066; | 168-171; MYRISTYL | |
| | | | 257-275, | 128-133; MYRISTYL | |
| | | | 1.113; | 147-152; MYRISTYL | |
| | | | 169-181, | 150-155; | |
| | | | 1.172; | PKC_PHOSPHO_SITE | |
| | | | 551-562, | 291-293; | |
| | | | 1.138; | CK2_PHOSPHO_SITE | |
| | | | 198-221, | 23-26; MYRISTYL | |
| | | | 1.172; | 148-153; | |
| | | | 10-16, 1.06; | PKC_PHOSPHO_SITE | |
| | | | 57-63, 1.071; | 12-14; | |
| | | | 514-520, | CK2_PHOSPHO_SITE | |
| | | | 1.049; | 38-41; MYRISTYL | |
| | | | 316-335, | 64-69; | |
| | | | 1.144; | PKC_PHOSPHO_SITE | |
| | | | 65-86, 1.134; | 124-126; MYRISTYL | |
| | | | 158-164, | 578-583; | |
| | | | 1.104; | ASN_GLYCOSYLATION | |
| | | | 30-36, 1.085; | 508-511; | |
| | | | 228-237, | PKC_PHOSPHO_SITE | |
| | | | 1.108; | 442-444; MYRISTYL | |
| | | | 637-644, | 115-120; | |
| | | | 1.129; | CAMP_PHOSPHO_SITE | |
| | | | 654-660, | 288-291; MYRISTYL | |
| | | | 1.102; | 564-569; MYRISTYL | |
| | | | 409-421, | 498-503; MYRISTYL | |
| | | | 1.131; | 619-624; | |
| | | | 303-309, | CK2_PHOSPHO_SITE | |
| | | | 1.062; | 351-354; | |
| | | | 338-361, | PKC_PHOSPHO_SITE | |
| | | | 1.102; | 351-353; | |
| | | | 568-582, | CAMP_PHOSPHO_SITE | |
| | | | 1.143; | 8-11; MYRISTYL | |
| | | | 373-385, | 151-156; MYRISTYL | |
| | | | 1.112; | 129-134; | |
| | | | 97-105, | TYR_PHOSPHO_SITE | |
| | | | 1.059; | 375-382; | |
| | | | | ASN_GLYCOSYLATION | |
| | | | | 502-505; | |
| | | | | PKC_PHOSPHO_SITE | |
| | | | | 6-8; MYRISTYL 94-99; | |
| DEX0449_027.aa.2 | N | 0 - o1-771; | 345-351, | TYR_PHOSPHO_SITE | lon 3-759; AAA 330-525; |
| | | | 1.047; | 135-142; | ENDOLAPTASE |
| | | | 470-497, | ASN_GLYCOSYLATION | 574-590; AAA 327-472; |
| | | | 1.127; | 469-472; MYRISTYL | LON_SER 664-672; |
| | | | 238-262, | 64-69; MYRISTYL | DISEASERSIST |
| | | | 1.214; | 579-584; MYRISTYL | 391-405; LON 2-180; |
| | | | 204-218, | 575-580; | DISEASERSIST 330-345; |
| | | | 1.113; | CK2_PHOSPHO_SITE | ENDOLAPTASE |
| | | | 611-620, | 661-664; | 335-354; |
| | | | 1.076; | PKC_PHOSPHO_SITE | ENDOLAPTASE 714-732; |
| | | | 501-519, | 698-700; | ENDOLAPTASE |
| | | | 1.167; | ASN_GLYCOSYLATION | 691-710; LON 5-180; |
| | | | 133-145, | 452-455; | CLPPROTEASEA 441-455; |
| | | | 1.112; | CK2_PHOSPHO_SITE | ATP_GTP_A 335-342; |
| | | | 570-580, | 151-154; | CLPPROTEASEA |
| | | | 1.151; | ASN_GLYCOSYLATION | 331-349; |
| | | | 643-659, | 268-271; | ENDOLAPTASE 661-680; |
| | | | 1.166; | ASN_GLYCOSYLATION | |
| | | | 714-726, | 262-265; | |
| | | | 1.222; | CK2_PHOSPHO_SITE | |
| | | | 667-680, | 111-114; | |
| | | | 1.16; | CK2_PHOSPHO_SITE | |
| | | | 627-640, | 456-459; MYRISTYL | |
| | | | 1.059; | 258-263; | |
| | | | 521-544, | PKC_PHOSPHO_SITE | |
| | | | 1.106; | 661-663; | |
| | | | 742-758, | PKC_PHOSPHO_SITE | |
| | | | 1.154; | 111-113; MYRISTYL | |
| | | | 589-595, | 68-73; | |
| | | | 1.107; | PKC_PHOSPHO_SITE | |
| | | | 79-91, 1.062; | 202-204; | |
| | | | 732-740, | PKC_PHOSPHO_SITE | |
| | | | 1.093; | 595-597; | |
| | | | 6-19, 1.089; | CK2_PHOSPHO_SITE | |
| | | | 169-181, | 392-395; MYRISTYL | |
| | | | 1.131; | 102-107; MYRISTYL | |
| | | | 123-129, | 379-384; | |
| | | | 1.111; | PKC_PHOSPHO_SITE | |
| | | | 184-190, | 625-627; MYRISTYL | |
| | | | 1.057; | 338-343; MYRISTYL | |
| | | | 397-404, | 324-329; MYRISTYL | |
| | | | 1.129; | 147-152; | |
| | | | 311-322, | CAMP_PHOSPHO_SITE | |
| | | | 1.138; | 4-7; MYRISTYL 73-78; | |
| | | | 32-57, 1.174; | MYRISTYL 495-500; | |
| | | | 432-452, | | |
| | | | 1.18; | | |
| | | | 546-552, | | |
| | | | 1.065; | | |
| | | | 328-342, | | |
| | | | 1.143; | | |
| | | | 416-425, | | |
| | | | 1.132; | | |
| | | | 95-121, | | |
| | | | 1.152; | | |
| | | | 694-706, | | |
| | | | 1.107; | | |
| | | | 292-301, | | |
| | | | 1.102; | | |
| | | | 274-280, | | |
| | | | 1.049; | | |
| | | | 555-566, | | |
| | | | 1.117; | | |
| | | | 383-391, | | |
| | | | 1.12; | | |
| | | | 375-381, | | |
| | | | 1.04; | | |
| DEX0449_027.aa.3 | N | 0 - o1-848; | 321-333, | CK2_PHOSPHO_SITE | lon 125-842; AAA |
| | | | 1.112; | 181-184; | 515-660; |
| | | | 205-223, | ASN_GLYCOSYLATION | DISEASERSIST 579-593; |
| | | | 1.113; | 174-177; MYRISTYL | LON 123-368; |
| | | | 499-510, | 810-815; MYRISTYL | CLPPROTEASEA 629-643; |
| | | | 1.138; | 526-531; MYRISTYL | LIPOCALIN 803-815; |
| | | | 131-144, | 93-98; MYRISTYL | AAA 518-713; |
| | | | 1.103; | 767-772; MYRISTYL | ENDOLAPTASE 523-542; |
| | | | 36-43, 1.066; | 76-81; | ENDOLAPTASE |
| | | | 286-309, | CK2_PHOSPHO_SITE | 762-778; |
| | | | 1.102; | 116-119; | CLPPROTEASEA 519-537; |
| | | | 533-539, | ASN_GLYCOSYLATION | ATP_GTP_A 523-530; |
| | | | 1.047; | 657-660; MYRISTYL | GLY_RICH 56-106; |
| | | | 585-592, | 512-517; | DISEASERSIST |
| | | | 1.129; | AMIDATION 241-244; | 518-533; LON 123-368; |
| | | | 146-169, | CK2_PHOSPHO_SITE | |
| | | | 1.172; | 80-83; | |
| | | | 426-450, | ASN_GLYCOSYLATION | |
| | | | 1.214; | 640-643; MYRISTYL | |
| | | | 117-129, | 89-94; | |
| | | | 1.172; | CAMP_PHOSPHO_SITE | |
| | | | 813-819, | 236-239; MYRISTYL | |
| | | | 1.153; | 446-451; MYRISTYL | |
| | | | 176-185, | 763-768; MYRISTYL | |
| | | | 1.108; | 98-103; MYRISTYL | |
| | | | 480-489, | 567-572; | |
| | | | 1.102; | PKC_PHOSPHO_SITE | |
| | | | 658-685, | 239-241; MYRISTYL | |
| | | | 1.127; | 824-829; | |
| | | | 839-845, | CK2_PHOSPHO_SITE | |
| | | | 1.126; | 299-302; MYRISTYL | |
| | | | 743-754, | 99-104; MYRISTYL | |
| | | | 1.117; | 12-17; MYRISTYL | |
| | | | 251-257, | 683-688; MYRISTYL | |
| | | | 1.062; | 42-47; MYRISTYL | |
| | | | 604-613, | 95-100; | |
| | | | 1.132; | ASN_GLYCOSYLATION | |
| | | | 734-740, | 450-453; MYRISTYL | |
| | | | 1.065; | 77-82; | |
| | | | 392-406, | PKC_PHOSPHO_SITE | |
| | | | 1.113; | 72-74; MYRISTYL | |
| | | | 784-790, | 81-86; MYRISTYL | |
| | | | 1.079; | 96-101; | |
| | | | 13-34, 1.134; | PKC_PHOSPHO_SITE | |
| | | | 516-530, | 299-301; MYRISTYL | |
| | | | 1.143; | 63-68; | |
| | | | 264-283, | TYR_PHOSPHO_SITE | |
| | | | 1.144; | 323-330; | |
| | | | 758-768, | PKC_PHOSPHO_SITE | |
| | | | 1.151; | 251-253; | |
| | | | 709-732, | PKC_PHOSPHO_SITE | |
| | | | 1.106; | 792-794; | |
| | | | 563-569, | AMIDATION 778-781; | |
| | | | 1.04; | CK2_PHOSPHO_SITE | |
| | | | 357-369, | 580-583; | |
| | | | 1.131; | CK2_PHOSPHO_SITE | |
| | | | 462-468, | 339-342; | |
| | | | 1.049; | ASN_GLYCOSYLATION | |
| | | | 311-317, | 456-459; | |
| | | | 1.111; | CK2_PHOSPHO_SITE | |
| | | | 571-579, | 644-647; MYRISTYL | |
| | | | 1.12; | 335-340; | |
| | | | 45-53, 1.059; | PKC_PHOSPHO_SITE | |
| | | | 794-809, | 390-392; | |
| | | | 1.217; | | |
| | | | 620-640, | | |
| | | | 1.18; | | |
| | | | 372-378, | | |
| | | | 1.057; | | |
| | | | 106-112, | | |
| | | | 1.104; | | |
| | | | 689-707, | | |
| | | | 1.167; | | |
| | | | 5-11, 1.071; | | |
| DEX0449_028.aa.1 | N | 0 - o1-124; | 4-14, 1.157; | MYRISTYL 115-120; | |
| | | | 110-116, | CK2_PHOSPHO_SITE | |
| | | | 1.024; | 15-18; | |
| | | | 37-45, 1.061; | TYR_PHOSPHO_SITE | |
| | | | 48-53, 1.048; | 58-66; | |
| | | | 62-79, 1.175; | CK2_PHOSPHO_SITE | |
| | | | | 99-102; | |
| | | | | PKC_PHOSPHO_SITE | |
| | | | | 37-39; | |
| | | | | TYR_PHOSPHO_SITE | |
| | | | | 45-53; | |
| | | | | ASN_GLYCOSYLATION | |
| | | | | 90-93; | |
| | | | | CK2_PHOSPHO_SITE | |
| | | | | 30-33; | |
| DEX0449_029.aa.1 | N | 1 - i1-16; | 11-36, 1.154; | CK2_PHOSPHO_SITE | KH 51-120; |
| | | tm17-34; | 181-194, | 242-245; | KH_TYPE_1_1 52-115; |
| | | o35-296; | 1.132; | PKC_PHOSPHO_SITE | KH 56-103; KH 128-178; |
| | | | 261-267, | 3-5; MYRISTYL | KH 123-195; |
| | | | 1.144; | 258-263; | KH_TYPE_1_2 124-190; |
| | | | 213-221, | CK2_PHOSPHO_SITE | |
| | | | 1.069; | 40-43; | |
| | | | 95-119, | PKC_PHOSPHO_SITE | |
| | | | 1.183; | 219-221; | |
| | | | 60-70, 1.115; | PKC_PHOSPHO_SITE | |
| | | | 247-254, | 146-148; MYRISTYL | |
| | | | 1.114; | 155-160; | |
| | | | 148-161, | ASN_GLYCOSYLATION | |
| | | | 1.085; | 239-242; | |
| | | | 125-139, | PKC_PHOSPHO_SITE | |
| | | | 1.129; | 179-181; | |
| | | | 167-177, | CK2_PHOSPHO_SITE | |
| | | | 1.148; | 195-198; MYRISTYL | |
| | | | | 22-27; | |
| | | | | CK2_PHOSPHO_SITE | |
| | | | | 179-182; | |
| | | | | CAMP_PHOSPHO_SITE | |
| | | | | 79-82; | |
| DEX0449_030.aa.1 | N | 1 - i1-164; | 11-17, 1.104; | PKC_PHOSPHO_SITE | MHCCLASSI 136-154; |
| | | tm165-187; | 83-101, | 161-163; | MHCCLASSI 65-81; |
| | | o188-195; | 1.178; | PKC_PHOSPHO_SITE | |
| | | | 140-151, | 99-101; MYRISTYL | |
| | | | 1.186; | 181-186; | |
| | | | 24-32, 1.128; | ASN_GLYCOSYLATION | |
| | | | 42-78, 1.18; | 21-24; | |
| | | | 114-126, | PKC_PHOSPHO_SITE | |
| | | | 1.137; | 68-70; MYRISTYL | |
| | | | 165-192, | 185-190; MYRISTYL | |
| | | | 1.253; | 158-163; | |
| | | | 105-112, | AMIDATION 191-194; | |
| | | | 1.023; | ASN_GLYCOSYLATION | |
| | | | | 129-132; MYRISTYL | |
| | | | | 171-176; | |
| | | | | CK2_PHOSPHO_SITE | |
| | | | | 131-134; | |
| | | | | ASN_GLYCOSYLATION | |
| | | | | 93-96; | |
| DEX0449_030.orf.1 | N | 1 - o1-165; | | ASN_GLYCOSYLATION | MHCCLASSI 64-80; |
| | | tm166-188; | | 128-131; | MHCCLASSI 135-153; |
| | | i189-194; | | AMIDATION 190-193; | |
| | | | | MYRISTYL | |
| | | | | 170-175; | |
| | | | | CK2_PHOSPHO_SITE | |
| | | | | 3-6; | |
| | | | | PKC_PHOSPHO_SITE | |
| | | | | 67-69; AMIDATION | |
| | | | | 3-6; | |
| | | | | ASN_GLYCOSYLATION | |
| | | | | 92-95; MYRISTYL | |
| | | | | 157-162; | |
| | | | | CK2_PHOSPHO_SITE | |
| | | | | 130-133; MYRISTYL | |
| | | | | 184-189; | |
| | | | | PKC_PHOSPHO_SITE | |
| | | | | 3-5; | |
| | | | | PKC_PHOSPHO_SITE | |
| | | | | 98-100; | |
| | | | | ASN_GLYCOSYLATION | |
| | | | | 20-23; MYRISTYL | |
| | | | | 7-12; MYRISTYL | |
| | | | | 180-185; | |
| | | | | PKC_PHOSPHO_SITE | |
| | | | | 160-162; | |
| | | | | CK2_PHOSPHO_SITE | |
| | | | | 7-10; | |
| | | | | ASN_GLYCOSYLATION | |
| | | | | 6-9; | |
| | | | | CAMP_PHOSPHO_SITE | |
| | | | | 5-8; MYRISTYL 2-7; | |
| DEX0449_031.aa.1 | N | 0 - o1-132; | 122-129, | MYRISTYL 22-27; | |
| | | | 1.15; | PKC_PHOSPHO_SITE | |
| | | | 10-24, 1.133; | 33-35; | |
| | | | 67-74, 1.074; | ASN_GLYCOSYLATION | |
| | | | 106-117, | 17-20; | |
| | | | 1.25; | ASN_GLYCOSYLATION | |
| | | | 94-102, | 2-5; | |
| | | | 1.038; | PKC_PHOSPHO_SITE | |
| | | | | 118-120; MYRISTYL | |
| | | | | 61-66; | |
| | | | | PKC_PHOSPHO_SITE | |
| | | | | 4-6; | |
| | | | | CK2_PHOSPHO_SITE | |
| | | | | 4-7; AMIDATION | |
| | | | | 103-106; MYRISTYL | |
| | | | | 89-94; | |
| | | | | CAMP_PHOSPHO_SITE | |
| | | | | 76-79; | |
| | | | | PKC_PHOSPHO_SITE | |
| | | | | 32-34; | |
| | | | | CK2_PHOSPHO_SITE | |
| | | | | 88-91; | |
| | | | | ASN_GLYCOSYLATION | |
| | | | | 27-30; | |
| DEX0449_031.orf.1 | N | 0 - o1-199; | 141-146, | CK2_PHOSPHO_SITE | LYS_RICH 5-40; |
| | | | 1.033; | 192-195; | |
| | | | 46-52, 1.027; | PKC_PHOSPHO_SITE | |
| | | | 54-61, 1.105; | 166-168; | |
| | | | 153-163, | PKC_PHOSPHO_SITE | |
| | | | 1.116; | 3-5; | |
| | | | 171-192, | PKC_PHOSPHO_SITE | |
| | | | 1.152; | 148-150; | |
| | | | 94-101, | PKC_PHOSPHO_SITE | |
| | | | 1.084; | 102-104; | |
| | | | | PKC_PHOSPHO_SITE | |
| | | | | 20-22; | |
| | | | | PKC_PHOSPHO_SITE | |
| | | | | 184-186; | |
| | | | | PKC_PHOSPHO_SITE | |
| | | | | 50-52; | |
| | | | | CK2_PHOSPHO_SITE | |
| | | | | 148-151; | |
| | | | | ASN_GLYCOSYLATION | |
| | | | | 167-170; | |
| | | | | CK2_PHOSPHO_SITE | |
| | | | | 79-82; | |
| | | | | CAMP_PHOSPHO_SITE | |
| | | | | 12-15; | |
| | | | | ASN_GLYCOSYLATION | |
| | | | | 77-80; | |
| | | | | PKC_PHOSPHO_SITE | |
| | | | | 79-81; | |
| DEX0449_032.aa.1 | N | 0 - o1-259; | 122-131, | ASN_GLYCOSYLATION | UBCc 111-255; |
| | | | 1.066; | 130-133; MYRISTYL | UQ_con 107-250; |
| | | | 136-174, | 98-103; MYRISTYL | UBIQUITIN_CONJUGAT_1 |
| | | | 1.19; | 53-58; | 181-195; |
| | | | 100-106, | CK2_PHOSPHO_SITE | sp_O14933_UBC8_HUMAN |
| | | | 1.068; | 132-135; MYRISTYL | 111-250; |
| | | | 82-89, 1.039; | 52-57; AMIDATION | UBIQUITIN_CONJUGAT_2 |
| | | | 190-197, | 2-5; | 111-244; |
| | | | 1.171; | PKC_PHOSPHO_SITE | |
| | | | 232-238, | 250-252; | |
| | | | 1.086; | PKC_PHOSPHO_SITE | |
| | | | 204-220, | 45-47; MYRISTYL | |
| | | | 1.175; | 17-22; MYRISTYL | |
| | | | 177-184, | 65-70; | |
| | | | 1.082; | CK2_PHOSPHO_SITE | |
| | | | 10-16, 1.056; | 115-118; | |
| | | | 21-53, 1.139; | PKC_PHOSPHO_SITE | |
| | | | | 177-179; MYRISTYL | |
| | | | | 74-79; | |
| | | | | CK2_PHOSPHO_SITE | |
| | | | | 93-96; | |
| | | | | PKC_PHOSPHO_SITE | |
| | | | | 93-95; | |
| | | | | CK2_PHOSPHO_SITE | |
| | | | | 113-116; MYRISTYL | |
| | | | | 70-75; MYRISTYL | |
| | | | | 69-74; | |
| DEX0449_032.aa.2 | N | 0 - i1-156; | 87-94, 1.171; | PKC_PHOSPHO_SITE | UBCc 8-152; |
| | | | 129-135, | 147-149; | UBIQUITIN_CONJUGAT_1 |
| | | | 1.086; | PKC_PHOSPHO_SITE | 78-92; |
| | | | 74-81, 1.082; | 74-76; | UBIQUITIN_CONJUGAT_2 |
| | | | 101-117, | CAMP_PHOSPHO_SITE | 13-141; |
| | | | 1.175; | 2-5; | sp_O14933_UBC8_HUMAN |
| | | | 19-28, 1.066; | ASN_GLYCOSYLATION | 13-147; UQ_con |
| | | | 33-71, 1.19; | 27-30; | 11-147; |
| | | | | CK2_PHOSPHO_SITE | |
| | | | | 29-32; | |
| | | | | PKC_PHOSPHO_SITE | |
| | | | | 5-7; | |
| | | | | CK2_PHOSPHO_SITE | |
| | | | | 12-15; | |
| DEX0449_032.orf.2 | N | 0 - o1-168; | 31-40, 1.066; | PKC_PHOSPHO_SITE | UBIQUITIN_CONJUGAT_2 |
| | | | 45-83, 1.19; | 159-161; | 20-153; UBCc 20-164; |
| | | | 4-10, 1.1; | CK2_PHOSPHO_SITE | UQ_con 15-159; |
| | | | 99-106, | 41-44; | sp_O14933_UBC8_HUMAN |
| | | | 1.171; | ASN_GLYCOSYLATION | 25-159; |
| | | | 141-147, | 39-42; MYRISTYL | UBIQUITIN_CONJUGAT_1 |
| | | | 1.086; | 16-21; | 90-104; |
| | | | 86-93, 1.082; | PKC_PHOSPHO_SITE | |
| | | | 113-129, | 86-88; | |
| | | | 1.175; | | |
| DEX0449_032.aa.3 | N | 0 - o1-137; | 82-98, 1.175; | AMIDATION 2-5; | UBCc 3-133; |
| | | | 68-75, 1.171; | PKC_PHOSPHO_SITE | UBIQUITIN_CONJUGAT_2 |
| | | | 110-116, | 55-57; | 12-122; |
| | | | 1.086; | ASN_GLYCOSYLATION | UBIQUITIN_CONJUGAT_1 |
| | | | 14-52, 1.19; | 8-11; | 59-73; |
| | | | 55-62, 1.082; | PKC_PHOSPHO_SITE | sp_O14933_UBC8_HUMAN |
| | | | | 128-130; MYRISTYL | 8-128; UQ_con 1-128; |
| | | | | 7-12; | |
| | | | | CK2_PHOSPHO_SITE | |
| | | | | 10-13; | |
| DEX0449_032.aa.4 | N | 0 - o1-237; | 155-162, | ASN_GLYCOSYLATION | sp_O14933_UBC8_HUMAN |
| | | | 1.082; | 24-27; | 126-228; |
| | | | 113-118, | PKC_PHOSPHO_SITE | sp_O14933_UBC8_HUMAN |
| | | | 1.041; | 65-67; MYRISTYL | 3-42; UQ_con 1-228; |
| | | | 168-175, | 85-90; | UBIQUITIN_CONJUGAT_1 |
| | | | 1.171; | PKC_PHOSPHO_SITE | 159-173; |
| | | | 121-152, | 155-157; | UBIQUITIN_CONJUGAT_2 |
| | | | 1.095; | PKC_PHOSPHO_SITE | 122-222; UBCc 5-233; |
| | | | 75-82, 1.124; | 4-6; | |
| | | | 95-101, 1.1; | PKC_PHOSPHO_SITE | |
| | | | 30-58, 1.19; | 228-230; | |
| | | | 182-198, | CK2_PHOSPHO_SITE | |
| | | | 1.175; | 26-29; | |
| | | | 210-216, | PKC_PHOSPHO_SITE | |
| | | | 1.086; | 118-120; | |
| | | | 16-25, 1.066; | | |
| | | | 5-14, 1.074; | | |
| DEX0449_032.orf.4 | N | 0 - o1-156; | 32-37, 1.041; | CK2_PHOSPHO_SITE | UBIQUITIN_CONJUGAT_2 |
| | | | 129-135, | 16-19; | 41-141; UQ_con |
| | | | 1.086; | PKC_PHOSPHO_SITE | 14-147; |
| | | | 101-117, | 147-149; | UBIQUITIN_CONJUGAT_1 |
| | | | 1.175; | PKC_PHOSPHO_SITE | 78-92; UBCc 12-152; |
| | | | 74-81, 1.082; | 74-76; | sp_O14933_UBC8_HUMAN |
| | | | 87-94, 1.171; | PKC_PHOSPHO_SITE | 45-147; |
| | | | 40-71, 1.095; | 37-39; MYRISTYL | |
| | | | | 14-19; | |
| DEX0449_033.aa.1 | N | 0 - o1-88; | 51-58, 1.097; | PKC_PHOSPHO_SITE | |
| | | | 4-12, 1.097; | 38-40; | |
| | | | 23-30, 1.121; | CK2_PHOSPHO_SITE | |
| | | | | 48-51; | |
| | | | | ASN_GLYCOSYLATION | |
| | | | | 79-82; | |
| DEX0449_033.aa.2 | N | 0 - o1-40; | 21-27, 1.087; | MYRISTYL 7-12; | |
| | | | 31-37, 1.071; | AMIDATION 10-13; | |
| DEX0449_033.orf.2 | N | 0 - o1-60; | 21-39, 1.171; | MYRISTYL 17-22; | |
| | | | 11-17, 1.065; | MYRISTYL 55-60; | |
| DEX0449_034.aa.1 | N | 0 - o1-213; | | PKC_PHOSPHO_SITE | |
| | | | | 77-79; | |
| | | | | CK2_PHOSPHO_SITE | |
| | | | | 64-67; MYRISTYL | |
| | | | | 108-113; | |
| | | | | PKC_PHOSPHO_SITE | |
| | | | | 209-211; | |
| | | | | CK2_PHOSPHO_SITE | |
| | | | | 161-164; | |
| | | | | CK2_PHOSPHO_SITE | |
| | | | | 122-125; MYRISTYL | |
| | | | | 23-28; | |
| | | | | CK2_PHOSPHO_SITE | |
| | | | | 113-116; MYRISTYL | |
| | | | | 5-10; | |
| | | | | CK2_PHOSPHO_SITE | |
| | | | | 77-80; | |
| | | | | PKC_PHOSPHO_SITE | |
| | | | | 64-66; MYRISTYL | |
| | | | | 73-78; | |
| | | | | CK2_PHOSPHO_SITE | |
| | | | | 209-212; | |
| DEX0449_035.aa.1 | N | 0 - o1-458; | 223-245, | ASN_GLYCOSYLATION | ANK 352-381; ANK |
| | | | 1.186; | 328-331; MYRISTYL | 219-248; ANK 388-421; |
| | | | 187-196, | 243-248; | ank 291-350; |
| | | | 1.158; | PKC_PHOSPHO_SITE | ANK_REPEAT_3 388-424; |
| | | | 175-180, | 352-354; | ank 183-215; |
| | | | 1.057; | ASN_GLYCOSYLATION | ank 388-424; ANK |
| | | | 427-436, | 171-174; | 183-212; ANK 291-321; |
| | | | 1.181; | PKC_PHOSPHO_SITE | ANKYRIN 405-417; |
| | | | 279-286, | 420-422; | ANK_REPEAT_2 |
| | | | 1.076; | CK2_PHOSPHO_SITE | 352-384; ank 352-384; |
| | | | 256-263, | 330-333; | ANK_REPEAT_1 |
| | | | 1.17; | ASN_GLYCOSYLATION | 219-251; |
| | | | 28-61, 1.087; | 149-152; | ANK_REP_REGION 183-432; |
| | | | 72-85, 1.167; | ASN_GLYCOSYLATION | ank 252-290; |
| | | | 366-385, | 77-80; AMIDATION | ank 219-251; |
| | | | 1.175; | 194-197; | ANKYRIN 253-265; |
| | | | 198-205, | ASN_GLYCOSYLATION | ANK 252-283; |
| | | | 1.169; | 247-250; | |
| | | | 108-114, | PKC_PHOSPHO_SITE | |
| | | | 1.091; | 43-45; MYRISTYL | |
| | | | 293-310, | 275-280; MYRISTYL | |
| | | | 1.204; | 416-421; | |
| | | | 316-347, | CK2_PHOSPHO_SITE | |
| | | | 1.133; | 120-123; MYRISTYL | |
| | | | 119-125, | 145-150; | |
| | | | 1.087; | ASN_GLYCOSYLATION | |
| | | | 154-162, | 136-139; | |
| | | | 1.094; | CK2_PHOSPHO_SITE | |
| | | | 265-276, | 288-291; | |
| | | | 1.128; | CK2_PHOSPHO_SITE | |
| | | | 355-361, | 18-21; | |
| | | | 1.101; | PKC_PHOSPHO_SITE | |
| | | | 392-412, | 334-336; | |
| | | | 1.161; | CK2_PHOSPHO_SITE | |
| | | | 100-106, | 404-407; | |
| | | | 1.066; | | |
| DEX0449_035.orf.1 | N | 0 - o1-439; | 274-291, | ASN_GLYCOSYLATION | ANK 272-302; ANK |
| | | | 1.204; | 309-312; | 369-402; |
| | | | 100-106, | ASN_GLYCOSYLATION | ANK_REPEAT_1 200-232; |
| | | | 1.087; | 130-133; MYRISTYL | ANKYRIN 234-246; |
| | | | 168-177, | 224-229; | ANKYRIN 386-398; |
| | | | 1.158; | ASN_GLYCOSYLATION | ANK_REPEAT_3 |
| | | | 179-186, | 152-155; | 369-405; ANK 233-264; |
| | | | 1.169; | ASN_GLYCOSYLATION | ANK 200-229; |
| | | | 297-328, | 228-231; MYRISTYL | ank 272-331; ANK |
| | | | 1.133; | 256-261; | 164-193; |
| | | | 4-42, 1.154; | CK2_PHOSPHO_SITE | ANK_REP_REGION 164-413; |
| | | | 246-257, | 101-104; | ank 200-232; |
| | | | 1.128; | AMIDATION 175-178; | ANK_REPEAT_2 333-365; |
| | | | 204-226, | PKC_PHOSPHO_SITE | ank 333-365; |
| | | | 1.186; | 315-317; | ank 164-196; ank |
| | | | 336-342, | PKC_PHOSPHO_SITE | 369-405; ank 233-271; |
| | | | 1.101; | 333-335; MYRISTYL | ANK 333-362; |
| | | | 347-366, | 126-131; MYRISTYL | |
| | | | 1.175; | 397-402; | |
| | | | 53-66, 1.167; | PKC_PHOSPHO_SITE | |
| | | | 260-267, | 401-403; | |
| | | | 1.076; | ASN_GLYCOSYLATION | |
| | | | 135-143, | 58-61; | |
| | | | 1.094; | CK2_PHOSPHO_SITE | |
| | | | 156-161, | 311-314; | |
| | | | 1.057; | PKC_PHOSPHO_SITE | |
| | | | 237-244, | 24-26; | |
| | | | 1.17; | CK2_PHOSPHO_SITE | |
| | | | 408-417, | 385-388; | |
| | | | 1.181; | CK2_PHOSPHO_SITE | |
| | | | 81-87, 1.066; | 269-272; | |
| | | | 373-393, | ASN_GLYCOSYLATION | |
| | | | 1.161; | 117-120; | |
| | | | 89-95, 1.091; | | |
| DEX0449_036.aa.1 | Y | 0 - o1-130; | 4-21, 1.165; | CK2_PHOSPHO_SITE | |
| | | | 23-43, 1.129; | 68-71; | |
| | | | 110-127, | PKC_PHOSPHO_SITE | |
| | | | 1.174; | 81-83; AMIDATION | |
| | | | 49-67, 1.178; | 74-77; MYRISTYL | |
| | | | 82-102, | 19-24; | |
| | | | 1.143; | CK2_PHOSPHO_SITE | |
| | | | | 81-84; | |
| | | | | CAMP_PHOSPHO_SITE | |
| | | | | 76-79; | |
| | | | | PKC_PHOSPHO_SITE | |
| | | | | 127-129; | |
| DEX0449_036.orf.1 | N | 0 - o1-243; | 157-196, | MYRISTYL 135-140; | TGF_BETA_2 145-231; |
| | | | 1.173; | PKC_PHOSPHO_SITE | sp_Q64280_TGF4_MOUSE |
| | | | 83-93, 1.055; | 173-175; MYRISTYL | 145-230; TGF-beta |
| | | | 215-223, | 19-24; MYRISTYL | 137-231; TGF_BETA_1 |
| | | | 1.167; | 61-66; MYRISTYL | 159-174; TGFB 141-231; |
| | | | 11-37, 1.163; | 121-126; MYRISTYL | |
| | | | 139-149, | 125-130; MYRISTYL | |
| | | | 1.056; | 46-51; | |
| | | | 225-240, | CK2_PHOSPHO_SITE | |
| | | | 1.175; | 196-199; MYRISTYL | |
| | | | 110-116, | 151-156; MYRISTYL | |
| | | | 1.067; | 37-42; | |
| | | | 49-61, 1.064; | PKC_PHOSPHO_SITE | |
| | | | 49-61, 1.064; | 206-208; MYRISTYL | |
| | | | 119-131, | 33-38; MYRISTYL | |
| | | | 1.061; | 50-55; | |
| | | | 201-208, | CK2_PHOSPHO_SITE | |
| | | | 1.12; | 206-209; | |
| DEX0449_037.aa.1 | N | 0 - o1-204; | 152-164, | CK2_PHOSPHO_SITE | |
| | | | 1.099; | 113-116; | |
| | | | 138-144, | CK2_PHOSPHO_SITE | |
| | | | 1.057; | 28-31; MYRISTYL | |
| | | | 194-201, | 153-158; MYRISTYL | |
| | | | 1.064; | 134-139; | |
| | | | 4-21, 1.091; | CK2_PHOSPHO_SITE | |
| | | | 30-61, 1.19; | 109-112; | |
| | | | 125-131, | ASN_GLYCOSYLATION | |
| | | | 1.074; | 59-62; MYRISTYL | |
| | | | 63-113, | 9-14; | |
| | | | 1.187; | PKC_PHOSPHO_SITE | |
| | | | | 163-165; | |
| | | | | CK2_PHOSPHO_SITE | |
| | | | | 141-144; | |
| DEX0449_038.aa.1 | Y | 0 - o1-80; | 4-36, 1.28; | CK2_PHOSPHO_SITE | |
| | | | 67-77, 1.06; | 64-67; MYRISTYL | |
| | | | | 71-76; | |
| DEX0449_038.orf.2 | N | 0 - o1-84; | 15-21, 1.024; | CK2_PHOSPHO_SITE | |
| | | | 65-71, 1.084; | 59-62; | |
| | | | 29-37, 1.061; | PKC_PHOSPHO_SITE | |
| | | | | 12-14; | |
| | | | | PKC_PHOSPHO_SITE | |
| | | | | 41-43; | |
| | | | | CK2_PHOSPHO_SITE | |
| | | | | 60-63; | |
| | | | | CK2_PHOSPHO_SITE | |
| | | | | 5-8; | |
| | | | | CAMP_PHOSPHO_SITE | |
| | | | | 74-77; | |
| | | | | PKC_PHOSPHO_SITE | |
| | | | | 22-24; | |
| DEX0449_038.aa.3 | Y | 0 - o1-56; | 4-17, 1.159; | | |
| | | | 34-53, 1.146; | | |
| DEX0449_039.aa.1 | Y | 0 - o1-451; | 26-42, 1.143; | MYRISTYL 351-356; | TPR 45-78; TPR 45-78; |
| | | | 70-77, 1.072; | MYRISTYL 365-370; | TPR 247-280; |
| | | | 4-11, 1.207; | CK2_PHOSPHO_SITE | TPR_REPEAT_1 45-78; |
| | | | 410-415, | 82-85; | TPR_REPEAT_2 205-238; |
| | | | 1.049; | CAMP_PHOSPHO_SITE | TPR 247-280; |
| | | | 181-193, | 360-363; | TPR 205-238; |
| | | | 1.095; | PKC_PHOSPHO_SITE | GLU_RICH 113-321; |
| | | | 88-100, | 389-391; | ATP_GTP_A 89-96; |
| | | | 1.087; | CK2_PHOSPHO_SITE | TPR 205-238; |
| | | | 368-381, | 336-339; MYRISTYL | TPR_REGION 205-280; |
| | | | 1.12; | 415-420; MYRISTYL | TPR_REPEAT_3 247-280; |
| | | | 328-341, | 106-111; | |
| | | | 1.121; | CK2_PHOSPHO_SITE | |
| | | | 62-68, 1.081; | 160-163; | |
| | | | 200-260, | PKC_PHOSPHO_SITE | |
| | | | 1.115; | 322-324; | |
| | | | 16-24, 1.105; | CK2_PHOSPHO_SITE | |
| | | | 46-60, 1.115; | 125-128; | |
| | | | 305-311, | CK2_PHOSPHO_SITE | |
| | | | 1.064; | 20-23; MYRISTYL | |
| | | | 264-277, | 254-259; | |
| | | | 1.08; | CK2_PHOSPHO_SITE | |
| | | | 433-439, | 414-417; | |
| | | | 1.075; | CK2_PHOSPHO_SITE | |
| | | | 112-118, | 294-297; | |
| | | | 1.13; | CK2_PHOSPHO_SITE | |
| | | | | 96-99; | |
| | | | | LEUCINE_ZIPPER | |
| | | | | 232-253; | |
| | | | | ASN_GLYCOSYLATION | |
| | | | | 158-161; | |
| | | | | TYR_PHOSPHO_SITE | |
| | | | | 244-251; MYRISTYL | |
| | | | | 348-353; | |
| | | | | CK2_PHOSPHO_SITE | |
| | | | | 166-169; | |
| | | | | CK2_PHOSPHO_SITE | |
| | | | | 129-132; MYRISTYL | |
| | | | | 438-443; | |
| | | | | CK2_PHOSPHO_SITE | |
| | | | | 143-146; | |
| | | | | AMIDATION 75-78; | |
| | | | | MYRISTYL 407-412; | |
| | | | | MYRISTYL 349-354; | |
| | | | | ASN_GLYCOSYLATION | |
| | | | | 164-167; | |
| | | | | CK2_PHOSPHO_SITE | |
| | | | | 261-264; | |
| | | | | PKC_PHOSPHO_SITE | |
| | | | | 359-361; | |
| DEX0449_040.aa.1 | N | 0 - o1-337; | 189-208, | CK2_PHOSPHO_SITE | gmd 24-331; |
| | | | 1.136; | 292-295; MYRISTYL | |
| | | | 4-11, 1.092; | 198-203; | |
| | | | 65-75, 1.046; | CK2_PHOSPHO_SITE | |
| | | | 291-301, | 32-35; | |
| | | | 1.06; | PKC_PHOSPHO_SITE | |
| | | | 313-319, | 277-279; MYRISTYL | |
| | | | 1.127; | 143-148; | |
| | | | 251-260, | PKC_PHOSPHO_SITE | |
| | | | 1.089; | 62-64; | |
| | | | 235-249, 1.1; | TYR_PHOSPHO_SITE | |
| | | | 159-165, | 115-123; | |
| | | | 1.066; | PKC_PHOSPHO_SITE | |
| | | | 89-100, 1.17; | 10-72; | |
| | | | 24-30, 1.212; | CAMP_PHOSPHO_SITE | |
| | | | 218-224, | 186-189; | |
| | | | 1.061; | CAMP_PHOSPHO_SITE | |
| | | | 279-289, | 55-58; MYRISTYL | |
| | | | 1.183; | 13-18; | |
| | | | 172-178, | PKC_PHOSPHO_SITE | |
| | | | 1.061; | 132-134; | |
| | | | 36-57, 1.131; | CK2_PHOSPHO_SITE | |
| | | | 107-157, | 154-157; | |
| | | | 1.134; | PKC_PHOSPHO_SITE | |
| | | | | 245-247; MYRISTYL | |
| | | | | 206-211; MYRISTYL | |
| | | | | 33-38; | |
| | | | | CK2_PHOSPHO_SITE | |
| | | | | 245-248; | |
| | | | | PKC_PHOSPHO_SITE | |
| | | | | 185-187; MYRISTYL | |
| | | | | 36-41; | |
| | | | | PKC_PHOSPHO_SITE | |
| | | | | 147-149; | |
| DEX0449_040.aa.2 | N | 0 - o1-332; | 24-30, 1.112; | CK2_PHOSPHO_SITE | ADH_SHORT 166-194; |
| | | | 314-324, | 32-35; MYRISTYL | gmd 24-332; |
| | | | 1.183; | 204-209; | |
| | | | 36-57, 1.131; | CAMP_PHOSPHO_SITE | |
| | | | 172-194, | 55-58; | |
| | | | 1.171; | PKC_PHOSPHO_SITE | |
| | | | 253-259, | 147-149; MYRISTYL | |
| | | | 1.061; | 241-246; | |
| | | | 107-157, | TYR_PHOSPHO_SITE | |
| | | | 1.134; | 115-123; | |
| | | | 4-11, 1.092; | PKC_PHOSPHO_SITE | |
| | | | 286-295, | 62-64; | |
| | | | 1.089; | CK2_PHOSPHO_SITE | |
| | | | 159-165, | 280-283; | |
| | | | 1.066; | PKC_PHOSPHO_SITE | |
| | | | 224-243, | 10-12; | |
| | | | 1.136; | PKC_PHOSPHO_SITE | |
| | | | 65-75, 1.046; | 132-134; MYRISTYL | |
| | | | 89-100, 1.17; | 143-148; | |
| | | | 270-248, 1.1; | CK2_PHOSPHO_SITE | |
| | | | 196-209, | 154-157; MYRISTYL | |
| | | | 1.113; | 13-18; | |
| | | | | PKC_PHOSPHO_SITE | |
| | | | | 211-213; MYRISTYL | |
| | | | | 233-238; | |
| | | | | PKC_PHOSPHO_SITE | |
| | | | | 312-314; | |
| | | | | CAMP_PHOSPHO_SITE | |
| | | | | 221-224; MYRISTYL | |
| | | | | 33-38; | |
| | | | | PKC_PHOSPHO_SITE | |
| | | | | 280-282; | |
| | | | | CK2_PHOSPHO_SITE | |
| | | | | 327-330; MYRISTYL | |
| | | | | 36-41; | |
| | | | | PKC_PHOSPHO_SITE | |
| | | | | 220-222; | |
| DEX0449_040.aa.3 | N | 0 - o1-382; | 172-194, | PKC_PHOSPHO_SITE | gmd 24-361; |
| | | | 1.171; | 147-149; | ADH_SHORT 166-194; |
| | | | 196-209, | PKC_PHOSPHO_SITE | |
| | | | 1.113; | 132-134; | |
| | | | 286-295, | CK2_PHOSPHO_SITE | |
| | | | 1.089; | 32-35; MYRISTYL | |
| | | | 159-165, | 33-38; | |
| | | | 1.066; | PKC_PHOSPHO_SITE | |
| | | | 253-259, | 10-12; MYRISTYL | |
| | | | 1.061; | 204-209; | |
| | | | 314-324, | PKC_PHOSPHO_SITE | |
| | | | 1.183; | 280-282; | |
| | | | 343-352, | CK2_PHOSPHO_SITE | |
| | | | 1.075; | 154-157; | |
| | | | 224-243, | PKC_PHOSPHO_SITE | |
| | | | 1.136; | 62-64; MYRISTYL | |
| | | | 107-157, | 352-357; MYRISTYL | |
| | | | 1.134; | 13-18; | |
| | | | 36-57, 1.131; | CK2_PHOSPHO_SITE | |
| | | | 65-75, 1.046; | 280-283; | |
| | | | 4-11, 1.092; | PKC_PHOSPHO_SITE | |
| | | | 24-30, 1.112; | 220-222; | |
| | | | 357-374, | TYR_PHOSPHO_SITE | |
| | | | 1.131; | 115-123; MYRISTYL | |
| | | | 326-341, | 143-148; | |
| | | | 1.108; | CAMP_PHOSPHO_SITE | |
| | | | 89-100, 1.17; | 55-58; MYRISTYL | |
| | | | 270-284, 1.1; | 241-246; | |
| | | | | PKC_PHOSPHO_SITE | |
| | | | | 211-213; | |
| | | | | PKC_PHOSPHO_SITE | |
| | | | | 312-314; | |
| | | | | CAMP_PHOSPHO_SITE | |
| | | | | 221-224; MYRISTYL | |
| | | | | 233-238; MYRISTYL | |
| | | | | 36-41; | |
| DEX0449_041.aa.1 | N | 0 - o1-258; | 41-48, 1.083; | PKC_PHOSPHO_SITE | UQ_con 9-154; |
| | | | 245-255, | 232-234; MYRISTYL | sp_Q93TC1_Q93TC1_HUMAN |
| | | | 1.126; | 159-164; | 28-153; UBCc |
| | | | 147-154, | AMIDATION 232-235; | 14-157; |
| | | | 1.063; | CAMP_PHOSPHO_SITE | UBIQUITIN_CONJUGAT_1 |
| | | | 134-139, | 241-244; | 84-98; |
| | | | 1.059; | CK2_PHOSPHO_SITE | UBIQUITIN_CONJUGAT_2 |
| | | | 108-124, | 178-181; MYRISTYL | 14-146; |
| | | | 92-99, 1.184; | 174-179; | |
| | | | 6-23, 1.154; | PKC_PHOSPHO_SITE | |
| | | | 212-220, | 115-117: | |
| | | | 1.139; | CK2_PHOSPHO_SITE | |
| | | | 61-69, 1.073; | 173-176; MYRISTYL | |
| | | | 168-174, | 52-57; | |
| | | | 1.029; | PKC_PHOSPHO_SITE | |
| | | | 189-197, | 162-164; | |
| | | | 1.112; | AMIDATION 185-188; | |
| | | | 71-88, 1.083; | CAMP_PHOSPHO_SITE | |
| | | | | 205-208; MYRISTYL | |
| | | | | 247-252; | |
| | | | | PKC_PHOSPHO_SITE | |
| | | | | 240-242; | |
| | | | | CK2_PHOSPHO_SITE | |
| | | | | 3-6; AMIDATION | |
| | | | | 203-206; | |
| | | | | PKC_PHOSPHO_SITE | |
| | | | | 244-246; | |
| | | | | ASN_GLYCOSYLATION | |
| | | | | 225-228; | |
| DEX0449_041.aa.2 | N | 0 - o1-262; | 226-232, | MYRISTYL 61-66; | sp_Q9BTC1_Q9BTC1_HUMAN |
| | | | 1.029; | CK2_PHOSPHO_SITE | 86-211; UBCc |
| | | | 166-182, | 231-234; MYRISTYL | 72-215; |
| | | | 1.184; | 248-253; | UBIQUITIN_CONJUGAT_2 |
| | | | 23-30, 1.141; | AMIDATION 31-34; | 72-204; |
| | | | 205-212, | MYRISTYL 232-237; | UBIQUITIN_CONJUGAT_1 |
| | | | 1.063; | PKC_PHOSPHO_SITE | 142-156; UQ_con |
| | | | 192-197, | 173-175; MYRISTYL | 67-212; |
| | | | 1.059; | 110-115; MYRISTYL | |
| | | | 99-106, | 247-252; | |
| | | | 1.083; | AMIDATION 41-44; | |
| | | | 65-81, 1.154; | CK2_PHOSPHO_SITE | |
| | | | 129-146, | 236-239; MYRISTYL | |
| | | | 1.083; | 217-222; MYRISTYL | |
| | | | 47-60, 1.082; | 45-50; MYRISTYL | |
| | | | 119-127, | 24-29; MYRISTYL | |
| | | | 1.073; | 38-43; | |
| | | | 4-18, 1.094; | PKC_PHOSPHO_SITE | |
| | | | 150-157, | 220-222; MYRISTYL | |
| | | | 1.184; | 244-249; MYRISTYL | |
| | | | | 254-259; | |
| DEX0449_041.orf.2 | N | 0 - o1-291; | 140-157, | MYRISTYL 255-260; | UBCc 83-226; UQ_con |
| | | | 1.083; | MYRISTYL 56-61; | 78-223; |
| | | | 34-41, 1.141; | CK2_PHOSPHO_SITE | sp_Q9BTC1_Q9BTC1_HUMAN |
| | | | 177-193, | 247-250; | 97-222; |
| | | | 1.184; | PKC_PHOSPHO_SITE | ARG_RICH 5-59; |
| | | | 58-71, 1.082; | 231-233; | UBIQUITIN_CONJUGAT_1 |
| | | | 76-92, 1.154; | PKC_PHOSPHO_SITE | 153-167; |
| | | | 110-117, | 282-284; MYRISTYL | UBIQUITIN_CONJUGAT_2 |
| | | | 1.083; | 49-54; | 83-215; |
| | | | 216-223, | CK2_PHOSPHO_SITE | |
| | | | 1.063; | 242-245; MYRISTYL | |
| | | | 161-168, | 72-77; | |
| | | | 1.184; | PKC_PHOSPHO_SITE | |
| | | | 12-29, 1.094; | 184-186; | |
| | | | 130-138, | AMIDATION 52-55; | |
| | | | 1.073; | MYRISTYL 121-126; | |
| | | | 237-243, | AMIDATION 42-45; | |
| | | | 1.029; | MYRISTYL 35-40; | |
| | | | 203-208, | MYRISTYL 243-248; | |
| | | | 1.059; | MYRISTYL 228-233; | |
| | | | | CAMP_PHOSPHO_SITE | |
| | | | | 279-282; | |
| DEX0449_041.aa.3 | N | 0 - o1-233; | 163-168, | MYRISTYL 218-223; | UBIQUITIN_CONJUGAT_2 |
| | | | 1.059; | PKC_PHOSPHO_SITE | 14-175; |
| | | | 6-23, 1.154; | 116-118; | UBIQUITIN_CONJUGAT_1 |
| | | | 41-48, 1.083; | CK2_PHOSPHO_SITE | 84-98; |
| | | | 197-203, | 207-210; MYRISTYL | sp_Q9BTC1_Q9BTC1_HUMAN |
| | | | 1.029; | 215-220; | 28-182; UBCc |
| | | | 92-99, 1.184; | CK2_PHOSPHO_SITE | 14-186; UQ_con 9-183; |
| | | | 140-153, | 202-205; | |
| | | | 1.184; | PKC_PHOSPHO_SITE | |
| | | | 176-183, | 144-146; | |
| | | | 1.063; | CK2_PHOSPHO_SITE | |
| | | | 108-117, | 3-6; MYRISTYL 52-57; | |
| | | | 1.18; | MYRISTYL 219-224; | |
| | | | 61-69, 1.073; | CK2_PHOSPHO_SITE | |
| | | | 71-88, 1.083; | 133-136; | |
| | | | 119-137, | PKC_PHOSPHO_SITE | |
| | | | 1.121; | 191-193; MYRISTYL | |
| | | | | 188-193; | |
| | | | | CK2_PHOSPHO_SITE | |
| | | | | 116-119; MYRISTYL | |
| | | | | 203-208; MYRISTYL | |
| | | | | 225-230; | |
| DEX0449_041.orf.3 | N | 0 - o1-390; | 145-162, | MYRISTYL 354-359; | OXYTOCINR 324-337; |
| | | | 1.154; | AMIDATION 80-83; | UBCc 153-325; |
| | | | 279-292, | PKC_PHOSPHO_SITE | UBIQUITIN_CONJUGAT_2 |
| | | | 1.184; | 283-285; | 153-314; |
| | | | 336-342, | CK2_PHOSPHO_SITE | UBIQUITIN_CONJUGAT_1 |
| | | | 1.029; | 346-349; | 223-237; UQ_con |
| | | | 180-187, | CK2_PHOSPHO_SITE | 148-322; |
| | | | 1.083; | 255-258; | sp_Q9BTC1_Q9BTC1_HUMAN |
| | | | 315-322, | PKC_PHOSPHO_SITE | 167-321; |
| | | | 1.063; | 255-257; MYRISTYL | OXYTOCINR 93-106; |
| | | | 231-238, | 128-133; | |
| | | | 1.184; | CK2_PHOSPHO_SITE | |
| | | | 200-208, | 142-145; MYRISTYL | |
| | | | 1.073; | 342-347; | |
| | | | 247-256, | AMIDATION 118-121; | |
| | | | 1.18; | CAMP_PHOSPHO_SITE | |
| | | | 15-31, 1.195; | 90-93; MYRISTYL | |
| | | | 41-51, 1.11; | 191-196; | |
| | | | 65-90, 1.129; | CAMP_PHOSPHO_SITE | |
| | | | 210-227, | 378-381; | |
| | | | 1.083; | PKC_PHOSPHO_SITE | |
| | | | 258-276, | 381-383; | |
| | | | 1.121; | PKC_PHOSPHO_SITE | |
| | | | 302-307, | 33-35; MYRISTYL | |
| | | | 1.059; | 85-90; | |
| | | | | CK2_PHOSPHO_SITE | |
| | | | | 272-275; | |
| | | | | PKC_PHOSPHO_SITE | |
| | | | | 45-47; | |
| | | | | PKC_PHOSPHO_SITE | |
| | | | | 330-332; | |
| | | | | CK2_PHOSPHO_SITE | |
| | | | | 341-344; MYRISTYL | |
| | | | | 327-332; | |
| DEX0449_042.aa.1 | N | 0 - o1-110; | 59-66, 1.064; | PKC_PHOSPHO_SITE | |
| | | | 23-35, 1.2; | 92-94; | |
| | | | 87-107, | CAMP_PHOSPHO_SITE | |
| | | | 1.135; | 37-40; MYRISTYL | |
| | | | 43-51, 1.055; | 2-7; | |
| | | | 4-19, 1.144; | PKC_PHOSPHO_SITE | |
| | | | 71-80, 1.11; | 35-37; MYRISTYL | |
| | | | | 56-61; | |
| DEX0449_043.aa.1 | N | 1 - i1-95; | 48-55, 1.06; | MYRISTYL 9-14; | AhpC-TSA 67-216; |
| | | tm96-118; | 228-234, | PKC_PHOSPHO_SITE | |
| | | o119-257; | 1.108; | 214-216; | |
| | | | 249-254, | PKC_PHOSPHO_SITE | |
| | | | 1.068; | 148-150; | |
| | | | 202-210, | CK2_PHOSPHO_SITE | |
| | | | 1.12; | 210-213; | |
| | | | 129-146, | PKC_PHOSPHO_SITE | |
| | | | 1.215; | 184-186; | |
| | | | 62-72, 1.097; | CK2_PHOSPHO_SITE | |
| | | | 212-224, | 201-204; | |
| | | | 1.14; | PKC_PHOSPHO_SITE | |
| | | | 157-169, | 224-226; | |
| | | | 1.121; | | |
| | | | 185-191, | | |
| | | | 1.092; | | |
| | | | 94-118, | | |
| | | | 1.175; | | |
| | | | 76-82, 1.04; | | |
| | | | 171-180, | | |
| | | | 1.089; | | |
| | | | 240-247, | | |
| | | | 1.039; | | |
| | | | 22-34, 1.191; | | |
| DEX0449_044.aa.1 | N | 0 - i1-105; | 74-81, 1.122; | CAMP_PHOSPHO_SITE | sp_P02403_RL37_HUMAN |
| | | | 95-102, | 4-7; AMIDATION | 12-62; |
| | | | 1.095; | 16-19; | Ribosomal_L37e 10-63; |
| | | | 24-48, 1.119; | CAMP_PHOSPHO_SITE | RIBOSOMAL_L37E |
| | | | | 63-66; | 12-31; |
| | | | | PKC_PHOSPHO_SITE | |
| | | | | 91-93; | |
| | | | | ASN_GLYCOSYLATION | |
| | | | | 21-24; | |
| | | | | ASN_GLYCOSYLATION | |
| | | | | 56-59; | |
| | | | | PKC_PHOSPHO_SITE | |
| | | | | 69-71; | |
| | | | | ASN_GLYCOSYLATION | |
| | | | | 65-68; | |
| | | | | PKC_PHOSPHO_SITE | |
| | | | | 58-60; | |
| DEX0449_044.orf.1 | N | 0 - o1-111; | 30-54, 1.119; | PKC_PHOSPHO_SITE | Ribosomal_L37e 18-69; |
| | | | 80-87, 1.122; | 75-77; | sp_P02403_RL37_HUMAN |
| | | | 102-108, | ASN_GLYCOSYLATION | 18-68; |
| | | | 1.095; | 71-74; | RIBOSOMAL_L37E 18-37; |
| | | | | ASN_GLYCOSYLATION | |
| | | | | 27-30; AMIDATION | |
| | | | | 22-25; | |
| | | | | ASN_GLYCOSYLATION | |
| | | | | 62-65; | |
| | | | | PKC_PHOSPHO_SITE | |
| | | | | 64-66; | |
| | | | | CAMP_PHOSPHO_SITE | |
| | | | | 69-72; | |
| | | | | PKC_PHOSPHO_SITE | |
| | | | | 97-99; | |
| DEX0449_044.aa.2 | N | 0 - o1-104; | | ASN_GLYCOSYLATION | Ribosomal_L37e 9-62; |
| | | | | 20-23; | sp_P02403_RL37_HUMAN |
| | | | | PKC_PHOSPHO_SITE | 10-61; |
| | | | | 2-4; | RIBOSOMAL_L37E 11-30; |
| | | | | ASN_GLYCOSYLATION | |
| | | | | 55-58; | |
| | | | | PKC_PHOSPHO_SITE | |
| | | | | 57-59; AMIDATION | |
| | | | | 15-18; | |
| | | | | CK2_PHOSPHO_SITE | |
| | | | | 2-5; | |
| | | | | CAMP_PHOSPHO_SITE | |
| | | | | 62-65; | |
| | | | | PKC_PHOSPHO_SITE | |
| | | | | 4-6; | |
| | | | | PKC_PHOSPHO_SITE | |
| | | | | 90-92; | |
| | | | | PKC_PHOSPHO_SITE | |
| | | | | 68-70; | |
| | | | | ASN_GLYCOSYLATION | |
| | | | | 64-67; | |
| DEX0449_044.orf.2 | N | 0 - o1-129; | | MYRISTYL 31-36; | |
| | | | | PKC_PHOSPHO_SITE | |
| | | | | 94-96; | |
| | | | | PKC_PHOSPHO_SITE | |
| | | | | 2-4; MYRISTYL 50-55; | |
| | | | | ASN_GLYCOSYLATION | |
| | | | | 35-38; | |
| | | | | PKC_PHOSPHO_SITE | |
| | | | | 108-110; | |
| | | | | ASN_GLYCOSYLATION | |
| | | | | 12-15; | |
| | | | | PKC_PHOSPHO_SITE | |
| | | | | 11-13; | |
| | | | | CK2_PHOSPHO_SITE | |
| | | | | 62-65; | |
| | | | | CK2_PHOSPHO_SITE | |
| | | | | 108-111; | |
| | | | | PKC_PHOSPHO_SITE | |
| | | | | 20-22; | |
| | | | | PKC_PHOSPHO_SITE | |
| | | | | 10-12; | |
| DEX0449_044.aa.3 | N | 0 - i1-96; | 15-39; 1.104; | ASN_GLYCOSYLATION | Ribosomal_L37e 7-54; |
| | | | 87-93, 1.095; | 56-59; | sp_P02403_RL37_HUMAN |
| | | | 4-9, 1.129; | CAMP_PHOSPHO_SITE | 12-53; |
| | | | 65-72, 1.122; | 54-57; | |
| | | | | ASN_GLYCOSYLATION | |
| | | | | 47-50; | |
| | | | | PKC_PHOSPHO_SITE | |
| | | | | 82-84; | |
| | | | | PKC_PHOSPHO_SITE | |
| | | | | 60-62; | |
| | | | | PKC_PHOSPHO_SITE | |
| | | | | 49-51; | |
| DEX0449_044.aa.4 | N | 0 - i1-55; | 23-36, 1.118; | PKC_PHOSPHO_SITE | |
| | | | 39-45, 1.072; | 20-22; | |
| | | | | CK2_PHOSPHO_SITE | |
| | | | | 34-37; | |
| | | | | PKC_PHOSPHO_SITE | |
| | | | | 34-36; | |
| | | | | CK2_PHOSPHO_SITE | |
| | | | | 7-10; | |
| DEX0449_044.orf.4 | N | 0 - o1-72; | 63-69, 1.095; | PKC_PHOSPHO_SITE | Ribosomal_L37e 1-30; |
| | | | 4-15, 1.104; | 58-60; | sp_Q9D823_Q9D823_MOUSE |
| | | | 41-48, 1.122; | CAMP_PHOSPHO_SITE | 1-29; |
| | | | | 30-33; | |
| | | | | PKC_PHOSPHO_SITE | |
| | | | | 25-27; | |
| | | | | PKC_PHOSPHO_SITE | |
| | | | | 36-38; | |
| | | | | ASN_GLYCOSYLATION | |
| | | | | 23-26; | |
| | | | | ASN_GLYCOSYLATION | |
| | | | | 32-35; | |
| DEX0449_045.aa.1 | N | 0 - o1-185; | 7-13, 1.077; | ASN_GLYCOSYLATION | |
| | | | 21-27, 1.045; | 98-101; MYRISTYL | |
| | | | 65-72, 1.166; | 9-14; MYRISTYL | |
| | | | 42-56, 1.188; | 178-183; | |
| | | | 137-162, | ASN_GLYCOSYLATION | |
| | | | 1.156; | 61-64; | |
| | | | 169-175, | CK2_PHOSPHO_SITE | |
| | | | 1.06; | 106-109; | |
| | | | 100-106, | PKC_PHOSPHO_SITE | |
| | | | 1.164; | 151-153; MYRISTYL | |
| | | | 110-127, | 14-19; | |
| | | | 1.193; | PKC_PHOSPHO_SITE | |
| | | | | 127-129; | |
| | | | | PKC_PHOSPHO_SITE | |
| | | | | 77-79; MYRISTYL | |
| | | | | 19-24; | |
| DEX0449_045.orf.1 | N | 0 - o1-214; | 194-211, | MYRISTYL 71-76; | |
| | | | 1.128; | ASN_GLYCOSYLATION | |
| | | | 14-21, 1.059; | 147-150; MYRISTYL | |
| | | | 182-191, | 145-150; | |
| | | | 1.098; | PKC_PHOSPHO_SITE | |
| | | | 86-101, | 176-178; MYRISTYL | |
| | | | 1.148; | 150-155; | |
| | | | 49-67, 1.235; | PKC_PHOSPHO_SITE | |
| | | | 72-83, 1.199; | 66-68; | |
| | | | 105-113, | PKC_PHOSPHO_SITE | |
| | | | 1.105; | 34-36; | |
| | | | 120-180, | | |
| | | | 1.17; | | |
| | | | 29-47, 1.107; | | |
| | | | 4-11, 1.148; | | |
| DEX0449_045.aa.2 | N | 0 - o1-131; | 7-13, 1.077; | ASN_GLYCOSYLATION | RIBOSOMAL_L18E 70-87; |
| | | | 21-27, 1.045; | 61-64; | sp_O07020 RL18 HUMAN |
| | | | 100-106, | ASN_GLYCOSYLATION | |
| | | | 1.164; | 98-101; MYRISTYL | 49-119; |
| | | | 65-72, 1.166; | 19-24; | Ribosomal_L18e 31-131; |
| | | | 42-56, 1.188; | CK2_PHOSPHO_SITE | |
| | | | 110-122, | 106-109; | |
| | | | 1.136; | PKC_PHOSPHO_SITE | |
| | | | | 77-79; MYRISTYL | |
| | | | | 9-14; MYRISTYL | |
| | | | | 14-19; | |
| DEX0449_045.orf.2 | N | 0 - o1-132; | 22-28, 1.045; | ASN_GLYCOSYLATION | RIBOSOMAL_L18E 71-88; |
| | | | 101-107, | 62-65; | Ribosomal_L18e |
| | | | 1.164; | ASN_GLYCOSYLATION | 32-132; |
| | | | 66-73, 1.166; | 99-102; MYRISTYL | sp_Q07020_RL18_HUMAN |
| | | | 9-14, 1.005; | 15-20; | 50-120; |
| | | | 43-57, 1.188; | CK2_PHOSPHO_SITE | |
| | | | 111-123, | 107-110; MYRISTYL | |
| | | | 1.136; | 20-25; MYRISTYL | |
| | | | | 10-15; MYRISTYL | |
| | | | | 6-11; | |
| | | | | PKC_PHOSPHO_SITE | |
| | | | | 78-80; | |
| DEX0449_045.aa.3 | N | 0 - o1-195; | 180-191, | ASN_GLYCOSYLATION | sp_Q9D987_Q9D987_MOUSE |
| | | | 1.088; | 54-57; MYRISTYL | 42-81; |
| | | | 143-153, | 7-12; MYRISTYL | Ribosomal_L18e 24-160; |
| | | | 1.193; | 172-177; MYRISTYL | RIBOSOMAL_L18E |
| | | | 74-80, 1.087; | 127-132; MYRISTYL | 63-80; |
| | | | 14-20, 1.045; | 12-17; MYRISTYL | |
| | | | 58-65, 1.166; | 109-114; MYRISTYL | |
| | | | 94-100, | 189-194; | |
| | | | 1.115; | PKC_PHOSPHO_SITE | |
| | | | 35-49, 1.188; | 4-6; | |
| | | | 160-172, | PKC_PHOSPHO_SITE | |
| | | | 1.133; | 70-72; | |
| | | | 115-141, | | |
| | | | 1.177; | | |
| DEX0449_046.aa.1 | Y | 0 - o1-115; | 18-51, 1.229; | PKC_PHOSPHO_SITE | |
| | | | 54-109, | 107-109; MYRISTYL | |
| | | | 1.225; | 34-39; MYRISTYL | |
| | | | | 102-107; | |
| | | | | PKC_PHOSPHO_SITE | |
| | | | | 38-40; MYRISTYL | |
| | | | | 98-103; | |
| | | | | TYR_PHOSPHO_SITE | |
| | | | | 40-48; | |
| DEX0449_046.aa.2 | N | 0 - o1-156; | 91-126, | MYRISTYL 126-131; | TIMP 13-148; NTR |
| | | | 1.217; | MYRISTYL 6-11; | 26-148; |
| | | | 37-83, 1.178; | CK2_PHOSPHO_SITE | |
| | | | 133-149, | 30-33; | |
| | | | 1.145; | ASN_GLYCOSYLATION | |
| | | | | 28-31; MYRISTYL | |
| | | | | 95-100; MYRISTYL | |
| | | | | 38-43; | |
| | | | | PKC_PHOSPHO_SITE | |
| | | | | 150-152; | |
| | | | | PKC_PHOSPHO_SITE | |
| | | | | 9-11; MYRISTYL | |
| | | | | 17-22; MYRISTYL | |
| | | | | 14-19; | |
| | | | | PKC_PHOSPHO_SITE | |
| | | | | 127-129; | |
| DEX0449_047.aa.1 | Y | 0 - o1-226; | 141-154, | MYRISTYL 26-31; | CYCLIN 83-185; |
| | | | 1.109; | CK2_PHOSPHO_SITE | KV14CHANNEL 19-28; |
| | | | 159-176, | 71-74; MYRISTYL | ALA_RICH 2-22; |
| | | | 1.17; | 21-26; MYRISTYL | ANTIFREEZEI 13-22; |
| | | | 180-210, | 9-14; | ANTIFREEZEI 1-11; |
| | | | 1.214; | CK2_PHOSPHO_SITE | KV14CHANNEL 6-16; |
| | | | 42-57, 1.155; | 132-135; | cyclin 48-192; |
| | | | 212-223, | CK2_PHOSPHO_SITE | |
| | | | 1.121; | 73-76; MYRISTYL | |
| | | | 76-133, | 27-32; | |
| | | | 1.186; | CK2_PHOSPHO_SITE | |
| | | | 4-22, 1.064; | 67-70; MYRISTYL | |
| | | | 32-40, 1.093; | 34-39; MYRISTYL | |
| | | | | 44-49; | |
| DEX0449_047.orf.1 | N | 0 - o1-253; | 103-125, | PKC_PHOSPHO_SITE | SER_RICH 209-249; |
| | | | 1.18; | 229-231; | CYCLIN 13-111; |
| | | | 141-154, | CK2_PHOSPHO_SITE | |
| | | | 1.056; | 167-170; | |
| | | | 4-13, 1.152; | CAMP_PHOSPHO_SITE | |
| | | | 176-182, | 232-235; | |
| | | | 1.102; | PKC_PHOSPHO_SITE | |
| | | | 158-167, | 184-186; | |
| | | | 1.11; | ASN_GLYCOSYLATION | |
| | | | 37-48, 1.194; | 53-56; MYRISTYL | |
| | | | 57-88, 1.216; | 143-148; MYRISTYL | |
| | | | 90-96, 1.106; | 30-35; | |
| | | | 15-24, 1.127; | PKC_PHOSPHO_SITE | |
| | | | 197-203, | 180-182; | |
| | | | 1.06; | TYR_PHOSPHO_SITE | |
| | | | | 214-220; | |
| | | | | PKC_PHOSPHO_SITE | |
| | | | | 11-13; MYRISTYL | |
| | | | | 202-207; | |
| | | | | PKC_PHOSPHO_SITE | |
| | | | | 246-248; | |
| | | | | CK2_PHOSPHO_SITE | |
| | | | | 98-101; MYRISTYL | |
| | | | | 238-243; | |
| | | | | PKC_PHOSPHO_SITE | |
| | | | | 167-169; MYRISTYL | |
| | | | | 242-247; | |
| | | | | CK2_PHOSPHO_SITE | |
| | | | | 121-124; | |
| | | | | PKC_PHOSPHO_SITE | |
| | | | | 55-57; MYRISTYL | |
| | | | | 190-195; | |
| DEX0449_047.orf.2 | N | 0 - o1-346; | 57-88, 1.216; | PKC_PHOSPHO_SITE | HIGHMOBLTYIY 249-268; |
| | | | 176-182, | 180-182; | SER_RICH 209-302; |
| | | | 1.102; | TYR_PHOSPHO_SITE | HIGHMOBLTYIY |
| | | | 103-125, | 276-283; | 222-233; |
| | | | 1.18; | PKC_PHOSPHO_SITE | TUBBYPROTEIN 171-196; |
| | | | 15-24, 1.127; | 333-335; MYRISTYL | TUBBYPROTEIN |
| | | | 197-203, | 190-195; | 285-311; |
| | | | 1.06; 4-13, | PKC_PHOSPHO_SITE | HIGHMOBLTYIY 207-219; |
| | | | 1.152; | 275-277; | ARG_RICH 207-339; |
| | | | 37-48, 1.194; | PKC_PHOSPHO_SITE | CYCLIN 13-111; |
| | | | 280-287, | 295-297; MYRISTYL | |
| | | | 1.082; | 242-247; MYRISTYL | |
| | | | 315-320, | 30-35; | |
| | | | 1.033; | PKC_PHOSPHO_SITE | |
| | | | 158-167, | 184-186; | |
| | | | 1.11; | CK2_PHOSPHO_SITE | |
| | | | 141-154, | 98-101; MYRISTYL | |
| | | | 1.056; | 238-243; | |
| | | | 90-96, 1.106; | CK2_PHOSPHO_SITE | |
| | | | | 121-124; | |
| | | | | CAMP_PHOSPHO_SITE | |
| | | | | 232-235; | |
| | | | | CAMP_PHOSPHO_SITE | |
| | | | | 313-316; | |
| | | | | CK2_PHOSPHO_SITE | |
| | | | | 167-170; MYRISTYL | |
| | | | | 274-279; | |
| | | | | AMIDATION 333-336; | |
| | | | | PKC_PHOSPHO_SITE | |
| | | | | 229-231; | |
| | | | | PKC_PHOSPHO_SITE | |
| | | | | 11-13; MYRISTYL | |
| | | | | 143-148; | |
| | | | | ASN_GLYCOSYLATION | |
| | | | | 53-56; | |
| | | | | PKC_PHOSPHO_SITE | |
| | | | | 167-169; MYRISTYL | |
| | | | | 202-207; | |
| | | | | TYR_PHOSPHO_SITE | |
| | | | | 214-220; | |
| | | | | PKC_PHOSPHO_SITE | |
| | | | | 55-57; | |
| | | | | CK2_PHOSPHO_SITE | |
| | | | | 252-255; | |
| DEX0449_048.aa.1 | Y | 2 - i1-4; | 63-85, 1.21; | MYRISTYL 59-64; | CD225 1-67; |
| | | tm5-27; | 40-61, 1.119; | PKC_PHOSPHO_SITE | |
| | | o28-52; | 13-28, 1.179; | 3-5; | |
| | | tm53-75; | 6-11, 1.065; | PKC_PHOSPHO_SITE | |
| | | i76-91; | | 47-49; | |
| | | | | PKC_PHOSPHO_SITE | |
| | | | | 26-28; | |
| DEX0449_048.orf.1 | N | 0 - i1-92; | 12-52, 1.184; | MYRISTYL 40-45; | |
| | | | 59-89, 1.161; | MYRISTYL 1-6; | |
| | | | | MYRISTYL 59-64; | |
| | | | | PKC_PHOSPHO_SITE | |
| | | | | 55-57; | |
| | | | | TYR_PHOSPHO_SITE | |
| | | | | 42-49; | |
| DEX0449_049.aa.1 | N | 0 - o1-137; | 66-73, 1.106; | CK2_PHOSPHO_SITE | Ribophorin_I 2-137; |
| | | | 27-39, 1.189; | 107-110; | |
| | | | 89-95, 1.055; | PKC_PHOSPHO_SITE | |
| | | | 118-126, | 29-31; | |
| | | | 1.081; | PKC_PHOSPHO_SITE | |
| | | | 128-134, | 64-66; MYRISTYL | |
| | | | 1.045; | 39-44; | |
| | | | 41-61, 1.185; | CK2_PHOSPHO_SITE | |
| | | | 75-83, 1.108; | 6-9; | |
| | | | | CK2_PHOSPHO_SITE | |
| | | | | 62-65; | |
| | | | | PKC_PHOSPHO_SITE | |
| | | | | 24-26; | |
| | | | | PKC_PHOSPHO_SITE | |
| | | | | 128-130; | |
| | | | | TYR_PHOSPHO_SITE | |
| | | | | 108-115; | |
| | | | | PKC_PHOSPHO_SITE | |
| | | | | 87-89; | |
| DEX0449_049.orf.1 | N | 0 - o1-148; | | MYRISTYL 50-55; | Ribophorin_I 3-148; |
| | | | | PKC_PHOSPHO_SITE | |
| | | | | 98-100; | |
| | | | | PKC_PHOSPHO_SITE | |
| | | | | 35-37; | |
| | | | | CK2_PHOSPHO_SITE | |
| | | | | 118-121; | |
| | | | | PKC_PHOSPHO_SITE | |
| | | | | 139-141; | |
| | | | | CK2_PHOSPHO_SITE | |
| | | | | 22-25; | |
| | | | | TYR_PHOSPHO_SITE | |
| | | | | 119-126; | |
| | | | | CK2_PHOSPHO_SITE | |
| | | | | 17-20; | |
| | | | | TYR_PHOSPHO_SITE | |
| | | | | 16-24; | |
| | | | | CK2_PHOSPHO_SITE | |
| | | | | 73-76; | |
| | | | | PKC_PHOSPHO_SITE | |
| | | | | 40-42; | |
| | | | | PKC_PHOSPHO_SITE | |
| | | | | 75-77; | |
| DEX0449_050.aa.1 | Y | 0 - o1-479; | 466-476, | PKC_PHOSPHO_SITE | Ribophorin_I 30-437; |
| | | | 1.085; | 369-371; | |
| | | | 230-237, | CK2_PHOSPHO_SITE | |
| | | | 1.111; | 470-473; MYRISTYL | |
| | | | 394-403, 1.1; | 124-129; MYRISTYL | |
| | | | 126-146, | 298-303; | |
| | | | 1.185; | CK2_PHOSPHO_SITE | |
| | | | 5-17, 1.227; | 453-456; MYRISTYL | |
| | | | 151-158, | 59-64; | |
| | | | 1.106; | TYR_PHOSPHO_SITE | |
| | | | 253-261, | 391-398; | |
| | | | 1.094; | CK2_PHOSPHO_SITE | |
| | | | 405-448, | 399-402; | |
| | | | 1.182; | PKC_PHOSPHO_SITE | |
| | | | 160-168, | 63-65; AMIDATION | |
| | | | 1.108; | 462-465; | |
| | | | 300-311, | PKC_PHOSPHO_SITE | |
| | | | 1.133; | 276-278; MYRISTYL | |
| | | | 174-180, | 22-27; | |
| | | | 1.055; | PKC_PHOSPHO_SITE | |
| | | | 67-76, 1.118; | 213-215; | |
| | | | 328-376, | PKC_PHOSPHO_SITE | |
| | | | 1.147; | 114-116; | |
| | | | 37-59, 1.187; | CK2_PHOSPHO_SITE | |
| | | | 203-211, | 437-440; MYRISTYL | |
| | | | 1.081; | 60-65; | |
| | | | 112-124, | PKC_PHOSPHO_SITE | |
| | | | 1.189; | 149-151; | |
| | | | 280-294, | CK2_PHOSPHO_SITE | |
| | | | 1.102; | 192-195; | |
| | | | 26-34, 1.065; | ASN_GLYCOSYLATION | |
| | | | 78-89, 1.153; | 299-302; | |
| | | | | CAMP_PHOSPHO_SITE | |
| | | | | 450-453; | |
| | | | | CK2_PHOSPHO_SITE | |
| | | | | 147-150; | |
| | | | | PKC_PHOSPHO_SITE | |
| | | | | 109-111; | |
| | | | | CK2_PHOSPHO_SITE | |
| | | | | 385-388; | |
| | | | | CK2_PHOSPHO_SITE | |
| | | | | 262-265; | |
| | | | | PKC_PHOSPHO_SITE | |
| | | | | 462-464; | |
| | | | | PKC_PHOSPHO_SITE | |
| | | | | 279-281; MYRISTYL | |
| | | | | 324-329; | |
| | | | | TYR_PHOSPHO_SITE | |
| | | | | 193-200; | |
| | | | | PKC_PHOSPHO_SITE | |
| | | | | 172-174; | |
| DEX0449_050.aa.2 | Y | 0 - o1-361; | 160-168, | MYRISTYL 124-129; | Ribophorin_I 30-361; |
| | | | 1.108; | TYR_PHOSPHO_SITE | |
| | | | 67-76, 1.118; | 193-200; | |
| | | | 37-59, 1.187; | PKC_PHOSPHO_SITE | |
| | | | 230-237, | 149-151; MYRISTYL | |
| | | | 1.111; | 324-329; MYRISTYL | |
| | | | 280-294, | 22-27; | |
| | | | 1.102; | PKC_PHOSPHO_SITE | |
| | | | 112-124, | 172-174; | |
| | | | 1.189; | CK2_PHOSPHO_SITE | |
| | | | 328-354, | 147-150; MYRISTYL | |
| | | | 1.108; | 298-303; | |
| | | | 26-34, 1.065; | PKC_PHOSPHO_SITE | |
| | | | 5-17, 1.227; | 114-116; | |
| | | | 300-311, | PKC_PHOSPHO_SITE | |
| | | | 1.133; | 276-278; | |
| | | | 203-211, | CK2_PHOSPHO_SITE | |
| | | | 1.081; | 192-195; | |
| | | | 151-158, | PKC_PHOSPHO_SITE | |
| | | | 1.106; | 63-65; | |
| | | | 126-146, | PKC_PHOSPHO_SITE | |
| | | | 1.185; | 213-215; | |
| | | | 253-261, | ASN_GLYCOSYLATION | |
| | | | 1.094; | 299-302; | |
| | | | 174-180, | PKC_PHOSPHO_SITE | |
| | | | 1.055; | 109-111; MYRISTYL | |
| | | | 78-89, 1.153; | 60-65; | |
| | | | | PKC_PHOSPHO_SITE | |
| | | | | 279-281; MYRISTYL | |
| | | | | 59-64; | |
| | | | | CK2_PHOSPHO_SITE | |
| | | | | 262-265; | |
| DEX0449_050.aa.3 | Y | 0 - o1-420; | 395-406, | MYRISTYL 124-129; | Ribophorin_I 30-412; |
| | | | 1.196; | MYRISTYL 22-27; | |
| | | | 26-34, 1.065; | PKC_PHOSPHO_SITE | |
| | | | 37-59, 1.187; | 410-412; MYRISTYL | |
| | | | 5-17, 1.227; | 377-382; | |
| | | | 67-76, 1.118; | PKC_PHOSPHO_SITE | |
| | | | 174-180, | 172-174; | |
| | | | 1.055; | CK2_PHOSPHO_SITE | |
| | | | 126-146, | 192-195; | |
| | | | 1.185; | PKC_PHOSPHO_SITE | |
| | | | 410-417, | 109-111; MYRISTYL | |
| | | | 1.041; | 394-399; MYRISTYL | |
| | | | 230-237, | 59-64; | |
| | | | 1.111; | PKC_PHOSPHO_SITE | |
| | | | 151-158, | 114-116; | |
| | | | 1.106; | CK2_PHOSPHO_SITE | |
| | | | 300-311, | 262-265; | |
| | | | 1.133; | TYR_PHOSPHO_SITE | |
| | | | 203-211, | 193-200; | |
| | | | 1.081; | PKC_PHOSPHO_SITE | |
| | | | 160-168, | 149-151; | |
| | | | 1.108; | ASN_GLYCOSYLATION | |
| | | | 78-89, 1.153; | 299-302; MYRISTYL | |
| | | | 328-376, | 60-65; | |
| | | | 1.147; | PKC_PHOSPHO_SITE | |
| | | | 253-261, | 276-278; | |
| | | | 1.094; | CK2_PHOSPHO_SITE | |
| | | | 280-294, | 147-150; MYRISTYL | |
| | | | 1.102; | 324-329; | |
| | | | 112-124, | PKC_PHOSPHO_SITE | |
| | | | 1.189; | 279-281; | |
| | | | 383-393, | PKC_PHOSPHO_SITE | |
| | | | 1.162; | 63-65; MYRISTYL | |
| | | | | 298-303; | |
| | | | | PKC_PHOSPHO_SITE | |
| | | | | 213-215; | |
| | | | | PKC_PHOSPHO_SITE | |
| | | | | 369-371; | |
| DEX0449_051.aa.1 | N | 0 - o1-128; | 8-13, 1.039; | MYRISTYL 33-38; | |
| | | | 68-76, 1.059; | MYRISTYL 116-121; | |
| | | | 49-64, 1.126; | PKC_PHOSPHO_SITE | |
| | | | 104-117, | 106-108; | |
| | | | 1.058; | PKC_PHOSPHO_SITE | |
| | | | | 24-26; MYRISTYL | |
| | | | | 44-49; MYRISTYL | |
| | | | | 91-96; | |
| | | | | CK2_PHOSPHO_SITE | |
| | | | | 95-98; MYRISTYL | |
| | | | | 14-19; MYRISTYL | |
| | | | | 112-117; | |
| DEX0449_052.aa.1 | N | 0 - o1-315; | 170-187, | CK2_PHOSPHO_SITE | ank 124-156; ANK |
| | | | 1.133; | 160-163; MYRISTYL | 124-153; ank 57-89; |
| | | | 93-115, | 81-86; | ank 91-123; ANKYRIN |
| | | | 1.194; | ASN_GLYCOSYLATION | 137-149; ANKYRIN |
| | | | 256-263, | 155-158; MYRISTYL | 125-137; |
| | | | 1.083; | 136-141; | ANK_REP_REGION 21-179; |
| | | | 35-54, 1.172; | CK2_PHOSPHO_SITE | ANK 21-50; ank |
| | | | 58-81, 1.224; | 245-248; MYRISTYL | 21-55; ANK_REPEAT_3 |
| | | | 294-309, | 115-120; | 124-156; |
| | | | 1.089; | PKC_PHOSPHO_SITE | ANK_REPEAT_2 91-123; |
| | | | 267-273, | 21-23; | ANK_REPEAT_1 |
| | | | 1.122; | CK2_PHOSPHO_SITE | 57-89; ank 157-190; |
| | | | 17-30, 1.123; | 15-18; MYRISTYL | ANK 57-86; ANK 91-120; |
| | | | 199-208, | 5-10; | |
| | | | 1.083; | ASN_GLYCOSYLATION | |
| | | | 83-89, 1.046; | 85-88; | |
| | | | 159-165, | PKC_PHOSPHO_SITE | |
| | | | 1.053; | 88-90; MYRISTYL | |
| | | | 137-154, | 196-201; | |
| | | | 1.191; | CK2_PHOSPHO_SITE | |
| | | | 233-241, | 241-244; MYRISTYL | |
| | | | 1.127; | 192-197; MYRISTYL | |
| | | | | 158-163; MYRISTYL | |
| | | | | 223-228; MYRISTYL | |
| | | | | 9-14; | |
| | | | | PKC_PHOSPHO_SITE | |
| | | | | 210-212; | |
| DEX0449_053.aa.1 | N | 0 - o1-142; | 40-48, 1.074; | CAMP_PHOSPHO_SITE | |
| | | | 64-94, 1.145; | 17-20; | |
| | | | 108-117, | PKC_PHOSPHO_SITE | |
| | | | 1.083; | 20-22; | |
| | | | | PKC_PHOSPHO_SITE | |
| | | | | 132_134; MYRISTYL | |
| | | | | 38-43; | |
| | | | | PKC_PHOSPHO_SITE | |
| | | | | 137-139; | |
| | | | | PKC_PHOSPHO_SITE | |
| | | | | 10-12; | |
| | | | | CAMP_PHOSPHO_SITE | |
| | | | | 135-138; | |
| | | | | PKC_PHOSPHO_SITE | |
| | | | | 21-23; MYRISTYL | |
| | | | | 116-121; MYRISTYL | |
| | | | | 2-7; | |
| | | | | CK2_PHOSPHO_SITE | |
| | | | | 93-96; | |
| | | | | CAMP_PHOSPHO_SITE | |
| | | | | 134-137; | |
| | | | | AMIDATION 15-18; | |
| | | | | AMIDATION 120-123; | |
| DEX0449_053.aa.2 | N | 0 - o1-72; | 14-32, 1.094; | CAMP_PHOSPHO_SITE | |
| | | | 40-46, 1.064; | 65-68; | |
| | | | | CK2_PHOSPHO_SITE | |
| | | | | 38-41; | |
| | | | | CAMP_PHOSPHO_SITE | |
| | | | | 64-67; MYRISTYL | |
| | | | | 46-51; | |
| | | | | PKC_PHOSPHO_SITE | |
| | | | | 62-64; | |
| | | | | PKC_PHOSPHO_SITE | |
| | | | | 67-69; AMIDATION | |
| | | | | 50-53; MYRISTYL | |
| | | | | 2-7; | |
| DEX0449_053.orf.2 | N | 0 - o1-122; | 67-108, | CK2_PHOSPHO_SITE | |
| | | | 1.199; | 1-4; AMIDATION | |
| | | | 59-65, 1.06; | 115-118; | |
| | | | 11-47, 1.156; | ASN_GLYCOSYLATION | |
| | | | | 100-103; MYRISTYL | |
| | | | | 13-18; | |
| | | | | PKC_PHOSPHO_SITE | |
| | | | | 59-61; MYRISTYL | |
| | | | | 27-32; | |
| | | | | ASN_GLYCOSYLATION | |
| | | | | 107-110; | |
| | | | | PKC_PHOSPHO_SITE | |
| | | | | 95-97; MYRISTYL | |
| | | | | 53-58; | |
| DEX0449_054.aa.1 | N | 0 - o1-42; | 5-11, 1.101; | MYRISTYL 15-20; | |
| | | | 29-39, 1.142; | CK2_PHOSPHO_SITE | |
| | | | | 23-26; MYRISTYL | |
| | | | | 11-16; MYRISTYL | |
| | | | | 20-25; MYRISTYL | |
| | | | | 6-11; MYRISTYL | |
| | | | | 16-21; | |
| DEX0449_054.orf.1 | N | 0 - o1-260; | 54-80, 1.148; | CK2_PHOSPHO_SITE | GLU_RICH 211-258; |
| | | | 187-194, | 96-99; | ASP_RICH 178-260; |
| | | | 1.044; | CK2_PHOSPHO_SITE | NAP 12-209; |
| | | | 197-207, | 145-148; | |
| | | | 1.183; | PKC_PHOSPHO_SITE | |
| | | | 86-96, 1.133; | 145-147; | |
| | | | 34-52, 1.074; | CK2_PHOSPHO_SITE | |
| | | | 118-126, | 91-94; | |
| | | | 1.089; | PKC_PHOSPHO_SITE | |
| | | | 14-24, 1.051; | 135-137; | |
| | | | | ASN_GLYCOSYLATION | |
| | | | | 129-132; | |
| | | | | PKC_PHOSPHO_SITE | |
| | | | | 161-163; | |
| | | | | CAMP_PHOSPHO_SITE | |
| | | | | 151-154; | |
| | | | | PKC_PHOSPHO_SITE | |
| | | | | 150-152; | |
| DEX0449_054.orf.2 | N | 0 - o1-285; | 111-121, | PKC_PHOSPHO_SITE | ASP_RICH 203-285; |
| | | | 1.133; | 170-172; | NAP 37-234; |
| | | | 212-219, | PKC_PHOSPHO_SITE | GLU_RICH 236-283; |
| | | | 1.044; | 160-162; | |
| | | | 79-105, | PKC_PHOSPHO_SITE | |
| | | | 1.148; | 186-188; | |
| | | | 4-33, 1.166; | ASN_GLYCOSYLATION | |
| | | | 39-45, 1.051; | 154-157; | |
| | | | 222-232, | CK2_PHOSPHO_SITE | |
| | | | 1.183; | 121-124; | |
| | | | 59-77, 1.074; | CK2_PHOSPHO_SITE | |
| | | | 143-151, | 1-4; | |
| | | | 1.089; | CK2_PHOSPHO_SITE | |
| | | | | 170-173; | |
| | | | | CAMP_PHOSPHO_SITE | |
| | | | | 176-179; | |
| | | | | PKC_PHOSPHO_SITE | |
| | | | | 175-177; | |
| | | | | CK2_PHOSPHO_SITE | |
| | | | | 116-119; | |
| DEX0449_055.aa.1 | N | 0 - o1-600; | 462-469, | CK2_PHOSPHO_SITE | IF 368-376; IF_tail |
| | | | 1.068; | 309-312; | 422-559; |
| | | | 36-47, 1.086; | CK2_PHOSPHO_SITE | PRENYLATION 597-600; |
| | | | 96-102, | 245-248; | filament 25-381; |
| | | | 1.051; | ASN_GLYCOSYLATION | |
| | | | 494-506, | 112-115; MYRISTYL | |
| | | | 1.08; | 515-520; | |
| | | | 263-272, | CK2_PHOSPHO_SITE | |
| | | | 1.055; | 59-62; | |
| | | | 170-176, | PKC_PHOSPHO_SITE | |
| | | | 1.091; | 408-410; | |
| | | | 248-261, | ASN_GLYCOSYLATION | |
| | | | 1.123; | 470-473; MYRISTYL | |
| | | | 541-547, | 433-438; | |
| | | | 1.129; | TYR_PHOSPHO_SITE | |
| | | | 189-198, | 291-299; MYRISTYL | |
| | | | 1.061; | 435-440; | |
| | | | 427-434, | PKC_PHOSPHO_SITE | |
| | | | 1.067; | 226-228; | |
| | | | 219-227, | PKC_PHOSPHO_SITE | |
| | | | 1.108; | 65-67; | |
| | | | 508-530, | PKC_PHOSPHO_SITE | |
| | | | 1.101; | 472-474; | |
| | | | 13-19, 1.061; | PKC_PHOSPHO_SITE | |
| | | | 295-309, | 498-500; | |
| | | | 1.102; | PKC_PHOSPHO_SITE | |
| | | | 83-89, 1.053; | 148-150; | |
| | | | 52-58, 1.102; | PKC_PHOSPHO_SITE | |
| | | | 154-166, | 114-116; | |
| | | | 1.071; | TYR_PHOSPHO_SITE | |
| | | | 69-79, 1.095; | 255-262; | |
| | | | 348-365, | CK2_PHOSPHO_SITE | |
| | | | 1.142; | 204-207; | |
| | | | 484-490, | PKC_PHOSPHO_SITE | |
| | | | 1.068; | 90-92; | |
| | | | 441-458, | PKC_PHOSPHO_SITE | |
| | | | 1.086; | 414-416; MYRISTYL | |
| | | | 382-397, | 403-408; MYRISTYL | |
| | | | 1.091; | 426-431; | |
| | | | 122-148, | PKC_PHOSPHO_SITE | |
| | | | 1.132; | 389-391; | |
| | | | | PKC_PHOSPHO_SITE | |
| | | | | 556-558; | |
| | | | | CAMP_PHOSPHO_SITE | |
| | | | | 558-561; MYRISTYL | |
| | | | | 506-511; | |
| | | | | PKC_PHOSPHO_SITE | |
| | | | | 59-61; | |
| | | | | CK2_PHOSPHO_SITE | |
| | | | | 65-68; | |
| | | | | PKC_PHOSPHO_SITE | |
| | | | | 268-270; | |
| | | | | CK2_PHOSPHO_SITE | |
| | | | | 455-458; | |
| | | | | CK2_PHOSPHO_SITE | |
| | | | | 194-197; | |
| | | | | PKC_PHOSPHO_SITE | |
| | | | | 213-215; | |
| | | | | CK2_PHOSPHO_SITE | |
| | | | | 139-142; MYRISTYL | |
| | | | | 535-540; | |
| | | | | CK2_PHOSPHO_SITE | |
| | | | | 472-475; | |
| | | | | CK2_PHOSPHO_SITE | |
| | | | | 90-93; | |
| | | | | PKC_PHOSPHO_SITE | |
| | | | | 539-541; | |
| | | | | PKC_PHOSPHO_SITE | |
| | | | | 593-595; MYRISTYL | |
| | | | | 437-442; | |
| DEX0449_055.orf.1 | N | 0 - o1-620; | 447-454, | PKC_PHOSPHO_SITE | PRENYLATION 617-620; |
| | | | 1.067; | 134-136; | IF_tail 442-579; |
| | | | 368-385, | PKC_PHOSPHO_SITE | IF 388-396; |
| | | | 1.142; | 409-411; MYRISTYL | filament 45-401; |
| | | | 315-329, | 453-458; MYRISTYL | |
| | | | 1.102; | 446-451; | |
| | | | 142-168, | PKC_PHOSPHO_SITE | |
| | | | 1.132; | 576-578; | |
| | | | 33-39, 1.061; | PKC_PHOSPHO_SITE | |
| | | | 116-122, | 246-248; | |
| | | | 1.051; | CK2_PHOSPHO_SITE | |
| | | | 103-109, | 85-88; | |
| | | | 1.053; | PKC_PHOSPHO_SITE | |
| | | | 402-417, | 288-290; | |
| | | | 1.091; | CK2_PHOSPHO_SITE | |
| | | | 504-510, | 214-217; MYRISTYL | |
| | | | 1.068; | 555-560; | |
| | | | 461-478, | CK2_PHOSPHO_SITE | |
| | | | 1.086; | 492-495; | |
| | | | 209-218, | PKC_PHOSPHO_SITE | |
| | | | 1.061; | 168-170; | |
| | | | 72-78, 1.102; | PKC_PHOSPHO_SITE | |
| | | | 482-489, | 613-615; | |
| | | | 1.068; | PKC_PHOSPHO_SITE | |
| | | | 89-99, 1.095; | 428-430; | |
| | | | 528-550, | TYR_PHOSPHO_SITE | |
| | | | 1.101; | 275-282; | |
| | | | 174-186, | PKC_PHOSPHO_SITE | |
| | | | 1.071; | 434-436; | |
| | | | 56-67, 1.086; | CK2_PHOSPHO_SITE | |
| | | | 190-196, | 159-162; | |
| | | | 1.091; | PKC_PHOSPHO_SITE | |
| | | | 239-247, | 518-520; | |
| | | | 1.108; | TYR_PHOSPHO_SITE | |
| | | | 268-281, | 311-319; | |
| | | | 1.123; | CK2_PHOSPHO_SITE | |
| | | | 514-526, | 475-478; | |
| | | | 1.08; | CAMP_PHOSPHO_SITE | |
| | | | 283-292, | 578-581; | |
| | | | 1.055; | PKC_PHOSPHO_SITE | |
| | | | 561-567, | 492-494; | |
| | | | 1.129; | CK2_PHOSPHO_SITE | |
| | | | 22-27, 1.014; | 224-227; | |
| | | | | ASN_GLYCOSYLATION | |
| | | | | 490-493; | |
| | | | | PKC_PHOSPHO_SITE | |
| | | | | 233-235; | |
| | | | | ASN_GLYCOSYLATION | |
| | | | | 132-135; | |
| | | | | CK2_PHOSPHO_SITE | |
| | | | | 265-268; MYRISTYL | |
| | | | | 423-428; | |
| | | | | CK2_PHOSPHO_SITE | |
| | | | | 329-332; | |
| | | | | PKC_PHOSPHO_SITE | |
| | | | | 79-81; | |
| | | | | CK2_PHOSPHO_SITE | |
| | | | | 79-82; MYRISTYL | |
| | | | | 455-460; | |
| | | | | PKC_PHOSPHO_SITE | |
| | | | | 110-112; MYRISTYL | |
| | | | | 535-540; | |
| | | | | AMIDATION 6-9; | |
| | | | | PKC_PHOSPHO_SITE | |
| | | | | 559-561; | |
| | | | | PKC_PHOSPHO_SITE | |
| | | | | 85-87; | |
| | | | | CK2_PHOSPHO_SITE | |
| | | | | 110-113; MYRISTYL | |
| | | | | 526-531; MYRISTYL | |
| | | | | 457-462; | |
| DEX0449_055.aa.2 | N | 0 - o1-237; | 174-186, | CK2_PHOSPHO_SITE | filament 45-232; |
| | | | 1.071; | 79-82; | |
| | | | 33-39, 1.061; | PKC_PHOSPHO_SITE | |
| | | | 199-207, | 110-112; | |
| | | | 1.122; | CK2_PHOSPHO_SITE | |
| | | | 218-234, | 85-88; | |
| | | | 1.134; | ASN_GLYCOSYLATION | |
| | | | 103-109, | 132-135; | |
| | | | 1.053; | AMIDATION 6-9; | |
| | | | 56-67, 1.086; | PKC_PHOSPHO_SITE | |
| | | | 142-168, | 79-81; | |
| | | | 1.132; | PKC_PHOSPHO_SITE | |
| | | | 89-99, 1.095; | 85-87; MYRISTYL | |
| | | | 22-27, 1.014; | 201-206; | |
| | | | 72-78, 1.102; | PKC_PHOSPHO_SITE | |
| | | | 190-196, | 205-207; | |
| | | | 1.091; | PKC_PHOSPHO_SITE | |
| | | | 116-122, | 168-170; | |
| | | | 1.051; | CK2_PHOSPHO_SITE | |
| | | | | 110-113; | |
| | | | | CK2_PHOSPHO_SITE | |
| | | | | 159-162; | |
| | | | | PKC_PHOSPHO_SITE | |
| | | | | 134-136; | |
| | | | | CK2_PHOSPHO_SITE | |
| | | | | 210-213; | |
| DEX0449_055.orf.3 | N | 0 - o1-620; | 482-489, | CAMP_PHOSPHO_SITE | PRENYLATION 617-620; |
| | | | 1.068; | 578-581; | IF 388-396; |
| | | | 268-281, | TYR_PHOSPHO_SITE | filament 45-401; |
| | | | 1.123; | 275-282; | IF_tail 442-579; |
| | | | 22-27, 1.014; | CK2_PHOSPHO_SITE | |
| | | | 561-567, | 329-332; | |
| | | | 1.129; | AMIDATION 6-9; | |
| | | | 56-67, 1.086; | CK2_PHOSPHO_SITE | |
| | | | 174-186, | 475-478; | |
| | | | 1.071; | PKC_PHOSPHO_SITE | |
| | | | 368-385, | 613-615; | |
| | | | 1.142; | PKC_PHOSPHO_SITE | |
| | | | 528-550, | 85-87; MYRISTYL | |
| | | | 1.101; | 446-451; | |
| | | | 447-454, | CK2_PHOSPHO_SITE | |
| | | | 1.067; | 110-113; MYRISTYL | |
| | | | 72-78, 1.102; | 555-560; | |
| | | | 283-292, | CK2_PHOSPHO_SITE | |
| | | | 1.055; | 79-82; | |
| | | | 209-218, | CK2_PHOSPHO_SITE | |
| | | | 1.061; | 85-88; | |
| | | | 89-99, 1.095; | PKC_PHOSPHO_SITE | |
| | | | 514-526, | 559-561; | |
| | | | 1.08; | TYR_PHOSPHO_SITE | |
| | | | 33-39, 1.061; | 311-319; | |
| | | | 461-478, | PKC_PHOSPHO_SITE | |
| | | | 1.086; | 79-81; | |
| | | | 504-510, | PKC_PHOSPHO_SITE | |
| | | | 1.068; | 168-170; MYRISTYL | |
| | | | 315-329, | 457-462; | |
| | | | 1.102; | CK2_PHOSPHO_SITE | |
| | | | 103-109, | 159-162; | |
| | | | 1.053; | PKC_PHOSPHO_SITE | |
| | | | 239-247, | 134-136; MYRISTYL | |
| | | | 1.108; | 455-460; MYRISTYL | |
| | | | 402-417, | 453-458; | |
| | | | 1.091; | ASN_GLYCOSYLATION | |
| | | | 190-196, | 132-135; | |
| | | | 1.091; | CK2_PHOSPHO_SITE | |
| | | | 142-168, | 492-495; | |
| | | | 1.132; | ASN_GLYCOSYLATION | |
| | | | 116-122, | 490-493; | |
| | | | 1.051; | PKC_PHOSPHO_SITE | |
| | | | | 428-430; | |
| | | | | CK2_PHOSPHO_SITE | |
| | | | | 214-217; MYRISTYL | |
| | | | | 526-531; | |
| | | | | PKC_PHOSPHO_SITE | |
| | | | | 576-578; | |
| | | | | PKC_PHOSPHO_SITE | |
| | | | | 409-411; | |
| | | | | PKC_PHOSPHO_SITE | |
| | | | | 288-290; | |
| | | | | PKC_PHOSPHO_SITE | |
| | | | | 110-112; | |
| | | | | PKC_PHOSPHO_SITE | |
| | | | | 434-436; MYRISTYL | |
| | | | | 535-540; | |
| | | | | PKC_PHOSPHO_SITE | |
| | | | | 233-235; MYRISTYL | |
| | | | | 423-428; | |
| | | | | PKC_PHOSPHO_SITE | |
| | | | | 492-494; | |
| | | | | CK2_PHOSPHO_SITE | |
| | | | | 265-268; | |
| | | | | PKC_PHOSPHO_SITE | |
| | | | | 518-520; | |
| | | | | CK2_PHOSPHO_SITE | |
| | | | | 224-227; | |
| | | | | PKC_PHOSPHO_SITE | |
| | | | | 246-248; | |

### Example 1b

### Sequence Alignment Support

[0447] Alignments between previously identified sequences and splice variant sequences are performed to confirm unique portions of splice variant nucleic acid and amino acid sequences. The alignments are done using the Needle program in the European Molecular Biology Open Software Suite (EMBOSS) version 2.2.0 available at www.emboss.org from EMBnet (http://www.embnet.org). Default settings are used unless otherwise noted. The Needle program in EMBOSS implements the Needleman-Wunsch algorithm. Needleman, S. B., Wunsch, C. D., J. Mol. Biol. 48:443-453 (1970).

[0448] It is well know to those skilled in the art that implication of alignment algorithms by various programs may result in minor changes in the generated output. These changes include but are not limited to: alignment scores (percent identity, similarity, and gap), display of nonaligned flanking sequence regions, and number assignment to residues. These minor changes in the output of an alignment do not alter the physical characteristics of the sequences or the differences between the sequences, e.g. regions of homology, insertions, or deletions.

### Example 1c

### RT-PCR Analysis

[0449] To detect the presence and tissue distribution of a particular splice variant Reverse Transcription-Polymerase Chain Reaction (RT-PCR) is performed using cDNA generated from a panel of tissue RNAs. See, e.g., Sambrook et al., Molecular Cloning: A Laboratory Manual, 2d ed., Cold Spring Harbor Laboratory Press (1989) and; Kawasaki E S et al., PNAS 85(15):5698 (1988). Total RNA is extracted from a variety of tissues and first strand cDNA is prepared with reverse transcriptase (RT). Each panel includes 23 cDNAs from five cancer types (lung, ovary, breast, colon, and prostate) and normal samples of testis, placenta and fetal brain. Each cancer set is composed of three cancer cDNAs from different donors and one normal pooled sample. Using a standard enzyme kit from BD Bioscience Clontech (Mountain View, Calif.), the target transcript is detected with sequence-specific primers designed to only amplify the particular splice variant. The PCR reaction is run on the GeneAmp PCR system 9700 (Applied Biosystem, Foster City, Calif.) thermocycler under optimal conditions. One of ordinary skill can design appropriate primers and determine optimal conditions. The amplified product is resolved on an agarose gel to detect a band of equivalent size to the predicted RT-PCR product. A band indicated the presence of the splice variant in a sample. The relation of the amplified product to the splice variant was subsequently confirmed by DNA sequencing.

[0450] After subcloning, all positively screened clones are sequence verified. The DNA sequence verification results show the splice variant contains the predicted sequence differences in comparison with the reference sequence.

[0451] Results for RT-PCR analysis include the sequence DEX ID, Lead Name, Cancer Tissue(s) the transcript was detected in, Normal Tissue(s) the transcript was detected in, the predicted length of the RT-PCR product, and the Confirmed Length of the RT-PCR product.

[0452] RT-PCR results confirm the presence SEQ ID NO: 1-112 in biologic samples and distinguish between related transcripts.

### Example 1d

### Secretion Assay

[0453] To determine if a protein encoded by a splice variant is secreted from cells a secretion assay is preformed. A pcDNA3.1 clone containing the gene transcript which encodes the variant protein is transfected into 293T cells using the Superfect transfection reagent (Qiagen, Valencia Calif.). Transfected cells are incubated for 28 hours before the media is collected and immediately spun down to remove any detached cells. The adherent cells are solubilized with lysis buffer (1% NP40, 10 mM sodium phosphate pH7.0, and 0.15M NaCl). The lysed cells are collected and spun down and the supernatant extracted as cell lysate. Western immunoblot is carried out in the following manner: 15 μl of the cell lysate and media are run on 4-12% NuPage Bis-Tris gel (Invitrogen, Carlsbad Calif.), and blotted onto a PVDF membrane (Invitrogen, Carlsbad Calif.). The blot is incubated with a polyclonal primary antibody which binds to the variant protein (Imgenex, San Diego Calif.) and polyclonal goat anti-rabbit-peroxidase secondary antibody (Sigma-Aldrich, St. Louis Mo.). The blot is developed with the ECL Plus chemiluminescent detection reagent (Amersham BioSciences, Piscataway N.J.).

[0454] Secretion assay results are indicative of SEQ ID NO: 113-259 being a diagnostic marker and/or therapeutic target for cancer.

### Example 2a

### Gene Expression Analysis

[0455] Custom Microarray Experiment—Cancer

[0456] Custom oligonucleotide microarrays were provided by Agilent Technologies, Inc. (Palo Alto, Calif.). The microarrays were fabricated by Agilent using their technology for the in-situ synthesis of 60mer oligonucleotides (Hughes, et al. 2001, Nature Biotechnology 19:342-347). The 60mer microarray probes were designed by Agilent, from gene sequences provided by diaDexus, using Agilent proprietary algorithms. Whenever possible two different 60mers were designed for each gene of interest.

[0457] All microarray experiments were two-color experiments and were preformed using Agilent-recommended protocols and reagents. Briefly, each microarray was hybridized with cRNAs synthesized from RNA (total RNA for ovarian and prostate, polyA+RNA for lung, breast and colon samples), isolated from cancer and normal tissues, labeled with fluorescent dyes Cyanine3 (Cy3) or Cyanine5 (Cy5) (NEN Life Science Products, Inc., Boston, Mass.) using a linear amplification method (Agilent). In each experiment the experimental sample was RNA isolated from cancer tissue from a single individual and the reference sample was a pool of RNA isolated from normal tissues of the same organ as the cancerous tissue (i.e. normal ovarian tissue in experiments with ovarian cancer samples). Hybridizations were carried out at 60° C., overnight using Agilent in-situ hybridization buffer. Following washing, arrays were scanned with a GenePix 4000B Microarray Scanner (Axon Instruments, Inc., Union City, Calif.). The resulting images were analyzed with GenePix Pro 3.0 Microarray Acquisition and Analysis Software (Axon).

[0458] Data normalization and expression profiling were done with Expressionist software from GeneData Inc. (Daly City, Calif./Basel, Switzerland). Gene expression analysis was performed using only experiments that met certain quality criteria. The quality criteria that experiments must meet are a combination of evaluations performed by the Expressionist software and evaluations performed manually using raw and normalized data. To evaluate raw data quality, detection limits (the mean signal for a replicated negative control+2 Standard Deviations (SD)) for each channel were calculated. The detection limit is a measure of non-specific hybridization. Acceptable detection limits were defined for each dye (<80 for Cy5 and <150 for Cy3). Arrays with poor detection limits in one or both channels were not analyzed and the experiments were repeated. To evaluate normalized data quality, positive control elements included in the array were utilized. These array features should have a mean ratio of 1 (no differential expression). If these features have a mean ratio of greater than 1.5-fold up or down, the experiments were not analyzed further and were repeated. In addition to traditional scatter plots demonstrating the distribution of signal in each experiment, the Expressionist software also has minimum thresholding criteria that employ user defined parameters to identify quality data. These thresholds include two distinct quality measurements: 1) minimum area percentage, which is a measure of the integrity of each spot and 2) signal to noise ratio, which ensures that the signal being measured is significantly above any background (nonspecific) signal present. Only those features that met the threshold criteria were included in the filtering and analyses carried out by Expressionist. The thresholding settings employed require a minimum area percentage of 60% [(% pixels>background+2SD)−(% pixels saturated)], and a minimum signal to noise ratio of 2.0 in both channels. By these criteria, very low expressors, saturated features and spots with abnormally high local background were not included in analysis.

[0459] Relative expression data was collected from Expressionist based on filtering and clustering analyses. Up-regulated genes were identified using criteria for the percentage of experiments in which the gene is up-regulated by at least 2-fold. In general, up-regulation in ˜30% of samples tested was used as a cutoff for filtering.

[0460] Two microarray experiments were preformed for each normal and cancer tissue pair. The tissue specific Array Chip for each cancer tissue is a unique microarray specific to that tissue and cancer. The Multi-Cancer Array Chip is a universal microarray that was hybridized with samples from each of the cancers (ovarian, breast, colon, lung, and prostate). See the description below for the experiments specific to the different cancers.

Microarray Experiments and Data Tables

[0461] Colon Cancer Chips

[0462] For colon cancer two different chip designs were evaluated with overlapping sets of a total of 38 samples, comparing the expression patterns of colon cancer derived polyA+RNA to polyA+RNA isolated from a pool of 7 normal colon tissues. For the Colon Array Chip all 38 samples (23 Ascending colon carcinomas and 15 Rectosigmoidal carcinomas including: 5 stage I cancers, 15 stage II cancers, 15 stage III and 2 stage IV cancers, as well as 28 Grade1/2 and 10 Grade 3 cancers) were analyzed. The histopathologic grades for cancer are classified as follows: GX, cannot be assessed; G1, well differentiated; G2, Moderately differentiated; G3, poorly differentiated; and G4, undifferentiated. AJCC Cancer Staging Handbook, 5^{th} Edition, 1998, page 9. For the Colon Array Chip analysis, samples were further divided into groups based on the expression pattern of the known colon cancer associated gene Thymidilate Synthase (TS) (13 TS up 25 TS not up). The association of TS with advanced colorectal cancer is well documented. Paradiso et al., Br J Cancer 32(3):560-7 (2000); Etienne et al., J Clin Oncol 20(12):2832-43 (2002); Aschele et al. Clin Cancer Res. 6(12):4797-802 (2000). For the Multi-Cancer Array Chip a subset of 27 of these samples (14 Ascending colon carcinomas and 13 Rectosigmoidal carcinomas including 3 stage I cancers, 9 stage II cancers, 13 stage III and 2 stage IV cancers) were assessed.

[0463] The results for the statistically significant up-regulated genes on the Colon Array Chip are shown in Tables 1 and 2. The results for the statistically significant up-regulated genes on the Multi-Cancer Array Chip are shown in Table 3.

[0464] The first two columns of each table contain information about the sequence itself (Seq ID, Oligo Name), the next columns show the results obtained for all (“ALL”) the colon samples, ascending colon carcinomas (“ASC”), Rectosigmoidal carcinomas (“RS”), cancers corresponding to stages I and II (“ST1,2”), stages III and IV (“ST3,4”), grades 1 and 2 (“GR1,2”), grade 3 (“GR3”), cancers exhibiting up-regulation of the TS gene (“TSup”) or those not exhibiting up-regulation of the TS gene (“NOT TSup”). ‘% up’ indicates the percentage of all experiments in which up-regulation of at least 2-fold was observed n=38 for the Colon Array Chip (n=27 for the Multi-Cancer Array Chip), ‘% valid up’ indicates the percentage of experiments with valid expression values in which up-regulation of at least 2-fold was observed.

TABLE 1

| | | | Cln | | Cln | | Cln | | Cln | | Cln |
|---|---|---|---|---|---|---|---|---|---|---|---|
| | | Cln | ALL % | Cln | ASC % | Cln | RS % | Cln | ST1,2 % | Cln | ST3,4 |
| | | ALL | valid | ASC | valid | RS | valid | ST1,2 | valid | ST3,4 | % valid |
| | Oligo | % up | up | % up | up | % up | up | % up | up | % up | up |
| DEX ID | Name | n = 38 | n = 38 | n = 23 | n = 23 | n = 15 | n = 15 | n = 20 | n = 20 | n = 18 | n = 18 |
| DEX0449_001.nt.1 | 10296.0 | 44.7 | 44.7 | 60.9 | 60.9 | 20.0 | 20.0 | 45.0 | 45.0 | 44.4 | 44.4 |
| DEX0449_001.nt.1 | 10297.0 | 63.2 | 63.2 | 73.9 | 73.9 | 46.7 | 46.7 | 65.0 | 65.0 | 61.1 | 61.1 |
| DEX0449_044.nt.1 | 33264.0 | 5.3 | 8.0 | 0.0 | 0.0 | 13.3 | 25.0 | 0.0 | 0.0 | 11.1 | 15.4 |
| DEX0449_044.nt.1 | 33265.0 | 10.5 | 11.8 | 4.3 | 5.0 | 20.0 | 21.4 | 5.0 | 5.6 | 16.7 | 18.8 |
| DEX0449_044.nt.2 | 33264.0 | 5.3 | 8.0 | 0.0 | 0.0 | 13.3 | 25.0 | 0.0 | 0.0 | 11.1 | 15.4 |
| DEX0449_044.nt.2 | 33265.0 | 10.5 | 11.8 | 4.3 | 5.0 | 20.0 | 21.4 | 5.0 | 5.6 | 16.7 | 18.8 |
| DEX0449_044.nt.3 | 33264.0 | 5.3 | 8.0 | 0.0 | 0.0 | 13.3 | 25.0 | 0.0 | 0.0 | 11.1 | 15.4 |
| DEX0449_044.nt.3 | 33265.0 | 10.5 | 11.8 | 4.3 | 5.0 | 20.0 | 21.4 | 5.0 | 5.6 | 16.7 | 18.8 |
| DEX0449_044.nt.4 | 33264.0 | 5.3 | 8.0 | 0.0 | 0.0 | 13.3 | 25.0 | 0.0 | 0.0 | 11.1 | 15.4 |
| DEX0449_044.nt.4 | 33265.0 | 10.5 | 11.8 | 4.3 | 5.0 | 20.0 | 21.4 | 5.0 | 5.6 | 16.7 | 18.8 |
| DEX0449_046.nt.1 | 33720.0 | 36.8 | 36.8 | 43.5 | 43.5 | 26.7 | 26.7 | 35.0 | 35.0 | 38.9 | 38.9 |
| DEX0449_047.nt.1 | 12809.0 | 15.8 | 15.8 | 13.0 | 13.0 | 20.0 | 20.0 | 5.0 | 5.0 | 27.8 | 27.8 |
| DEX0449_047.nt.1 | 12810.0 | 15.8 | 15.8 | 13.0 | 13.0 | 20.0 | 20.0 | 5.0 | 5.0 | 27.8 | 27.8 |
| DEX0449_047.nt.2 | 12809.0 | 15.8 | 15.8 | 13.0 | 13.0 | 20.0 | 20.0 | 5.0 | 5.0 | 27.8 | 27.8 |
| DEX0449_047.nt.2 | 12810.0 | 15.8 | 15.8 | 13.0 | 13.0 | 20.0 | 20.0 | 5.0 | 5.0 | 27.8 | 27.8 |
| DEX0449_048.nt.1 | 28637.0 | 73.7 | 73.7 | 82.6 | 82.6 | 60.0 | 60.0 | 70.0 | 70.0 | 77.8 | 77.8 |
| DEX0449_048.nt.1 | 28638.0 | 65.8 | 65.8 | 73.9 | 73.9 | 53.3 | 53.3 | 70.0 | 70.0 | 61.1 | 61.1 |
| DEX0449_049.nt.1 | 10224.0 | 13.2 | 13.9 | 17.4 | 18.2 | 6.7 | 7.1 | 10.0 | 10.0 | 16.7 | 18.8 |
| DEX0449_049.nt.1 | 10225.0 | 7.9 | 8.8 | 8.7 | 9.5 | 6.7 | 7.7 | 0.0 | 0.0 | 16.7 | 20.0 |
| DEX0449_051.nt.1 | 28403.0 | 10.5 | 10.5 | 17.4 | 17.4 | 0.0 | 0.0 | 10.0 | 10.0 | 11.1 | 11.1 |
| DEX0449_052.nt.1 | 16385.0 | 21.1 | 21.1 | 21.7 | 21.7 | 20.0 | 20.0 | 20.0 | 20.0 | 22.2 | 22.2 |
| DEX0449_053.nt.1 | 17654.0 | 5.3 | 5.6 | 4.3 | 4.5 | 6.7 | 7.1 | 0.0 | 0.0 | 11.1 | 11.1 |
| DEX0449_053.nt.1 | 17655.0 | 13.2 | 13.9 | 17.4 | 19.0 | 6.7 | 6.7 | 10.0 | 10.5 | 16.7 | 17.6 |
| DEX0449_053.nt.2 | 17654.0 | 5.3 | 5.6 | 4.3 | 4.5 | 6.7 | 7.1 | 0.0 | 0.0 | 11.1 | 11.1 |
| DEX0449_053.nt.2 | 17655.0 | 13.2 | 13.9 | 17.4 | 19.0 | 6.7 | 6.7 | 10.0 | 10.5 | 16.7 | 17.6 |
| DEX0449_054.nt.1 | 37943.0 | 52.6 | 52.6 | 56.5 | 56.5 | 46.7 | 46.7 | 50.0 | 50.0 | 55.6 | 55.6 |
| DEX0449_054.nt.1 | 37944.0 | 50.0 | 51.4 | 56.5 | 56.5 | 40.0 | 42.9 | 50.0 | 52.6 | 50.0 | 50.0 |
| DEX0449_054.nt.2 | 37943.0 | 52.6 | 52.6 | 56.5 | 56.5 | 46.7 | 46.7 | 50.0 | 50.0 | 55.6 | 55.6 |
| DEX0449_054.nt.2 | 37944.0 | 50.0 | 51.4 | 56.5 | 56.5 | 40.0 | 42.9 | 50.0 | 52.6 | 50.0 | 50.0 |
| DEX0449_055.nt.1 | 30951.0 | 65.8 | 65.8 | 69.6 | 69.6 | 60.0 | 60.0 | 65.0 | 65.0 | 66.7 | 66.7 |
| DEX0449_055.nt.1 | 30956.0 | 55.3 | 56.8 | 69.6 | 72.7 | 33.3 | 33.3 | 50.0 | 52.6 | 61.1 | 61.1 |
| DEX0449_055.nt.1 | 31201.0 | 65.8 | 65.8 | 69.6 | 69.6 | 60.0 | 60.0 | 70.0 | 70.0 | 61.1 | 61.1 |
| DEX0449_055.nt.2 | 30951.0 | 65.8 | 65.8 | 69.6 | 69.6 | 60.0 | 60.0 | 65.0 | 65.0 | 66.7 | 66.7 |
| DEX0449_055.nt.2 | 30956.0 | 55.3 | 56.8 | 69.6 | 72.7 | 33.3 | 33.3 | 50.0 | 52.6 | 61.1 | 61.1 |
| DEX0449_055.nt.2 | 31201.0 | 65.8 | 65.8 | 69.6 | 69.6 | 60.0 | 60.0 | 70.0 | 70.0 | 61.1 | 61.1 |
| DEX0449_055.nt.3 | 30951.0 | 65.8 | 65.8 | 69.6 | 69.6 | 60.0 | 60.0 | 65.0 | 65.0 | 66.7 | 66.7 |
| DEX0449_055.nt.3 | 30956.0 | 55.3 | 56.8 | 69.6 | 72.7 | 33.3 | 33.3 | 50.0 | 52.6 | 61.1 | 61.1 |
| DEX0449_055.nt.3 | 31201.0 | 65.8 | 65.8 | 69.6 | 69.6 | 60.0 | 60.0 | 70.0 | 70.0 | 61.1 | 61.1 |

[0465] TABLE 2

| | | | | | | | | Cln | Cln |
|---|---|---|---|---|---|---|---|---|---|
| | | | Cln | | Cln | | Cln TS | NOT | NOT TS |
| | | Cln | GR1,2 | Cln | GR3 | Cln | up | TS | up |
| | | GR1,2 | % valid | GR3 | % valid | TS up | % valid | up | % valid |
| | Oligo | % up | up | % up | up | % up | up | % up | up |
| DEX ID | Name | n = 28 | n = 28 | n = 10 | n = 10 | n = 13 | n = 13 | n = 25 | n = 25 |
| DEX0449_001.nt.1 | 10296.0 | 35.7 | 35.7 | 70.0 | 70.0 | 61.5 | 61.5 | 36.0 | 36.0 |
| DEX0449_001.nt.1 | 10297.0 | 53.6 | 53.6 | 90.0 | 90.0 | 84.6 | 84.6 | 52.0 | 52.0 |
| DEX0449_044.nt.1 | 33264.0 | 7.1 | 11.1 | 0.0 | 0.0 | 0.0 | 0.0 | 8.0 | 11.1 |
| DEX0449_044.nt.1 | 33265.0 | 10.7 | 11.5 | 10.0 | 12.5 | 7.7 | 11.1 | 12.0 | 12.0 |
| DEX0449_044.nt.2 | 33264.0 | 7.1 | 11.1 | 0.0 | 0.0 | 0.0 | 0.0 | 8.0 | 11.1 |
| DEX0449_044.nt.2 | 33265.0 | 10.7 | 11.5 | 10.0 | 12.5 | 7.7 | 11.1 | 12.0 | 12.0 |
| DEX0449_044.nt.3 | 33264.0 | 7.1 | 11.1 | 0.0 | 0.0 | 0.0 | 0.0 | 8.0 | 11.1 |
| DEX0449_044.nt.3 | 33265.0 | 10.7 | 11.5 | 10.0 | 12.5 | 7.7 | 11.1 | 12.0 | 12.0 |
| DEX0449_044.nt.4 | 33264.0 | 7.1 | 11.1 | 0.0 | 0.0 | 0.0 | 0.0 | 8.0 | 11.1 |
| DEX0449_044.nt.4 | 33265.0 | 10.7 | 11.5 | 10.0 | 12.5 | 7.7 | 11.1 | 12.0 | 12.0 |
| DEX0449_046.nt.1 | 33720.0 | 28.6 | 28.6 | 60.0 | 60.0 | 38.5 | 38.5 | 36.0 | 36.0 |
| DEX0449_047.nt.1 | 12809.0 | 10.7 | 10.7 | 30.0 | 30.0 | 15.4 | 15.4 | 16.0 | 16.0 |
| DEX0449_047.nt.1 | 12810.0 | 10.7 | 10.7 | 30.0 | 30.0 | 15.4 | 15.4 | 16.0 | 16.0 |
| DEX0449_047.nt.2 | 12809.0 | 10.7 | 10.7 | 30.0 | 30.0 | 15.4 | 15.4 | 16.0 | 16.0 |
| DEX0449_047.nt.2 | 12810.0 | 10.7 | 10.7 | 30.0 | 30.0 | 15.4 | 15.4 | 16.0 | 16.0 |
| DEX0449_048.nt.1 | 28637.0 | 71.4 | 71.4 | 80.0 | 80.0 | 69.2 | 69.2 | 76.0 | 76.0 |
| DEX0449_048.nt.1 | 28638.0 | 64.3 | 64.3 | 70.0 | 70.0 | 61.5 | 61.5 | 68.0 | 68.0 |
| DEX0449_049.nt.1 | 10224.0 | 3.6 | 3.7 | 40.0 | 44.4 | 30.8 | 30.8 | 4.0 | 4.3 |
| DEX0449_049.nt.1 | 10225.0 | 3.6 | 3.8 | 20.0 | 25.0 | 23.1 | 23.1 | 0.0 | 0.0 |
| DEX0449_051.nt.1 | 28403.0 | 3.6 | 3.6 | 30.0 | 30.0 | 23.1 | 23.1 | 4.0 | 4.0 |
| DEX0449_052.nt.1 | 16385.0 | 14.3 | 14.3 | 40.0 | 40.0 | 30.8 | 30.8 | 16.0 | 16.0 |
| DEX0449_053.nt.1 | 17654.0 | 0.0 | 0.0 | 20.0 | 20.0 | 15.4 | 16.7 | 0.0 | 0.0 |
| DEX0449_053.nt.1 | 17655.0 | 7.1 | 7.4 | 30.0 | 33.3 | 38.5 | 38.5 | 0.0 | 0.0 |
| DEX0449_053.nt.2 | 17654.0 | 0.0 | 0.0 | 20.0 | 20.0 | 15.4 | 16.7 | 0.0 | 0.0 |
| DEX0449_053.nt.2 | 17655.0 | 7.1 | 7.4 | 30.0 | 33.3 | 38.5 | 38.5 | 0.0 | 0.0 |
| DEX0449_054.nt.1 | 37943.0 | 46.4 | 46.4 | 70.0 | 70.0 | 76.9 | 76.9 | 40.0 | 40.0 |
| DEX0449_054.nt.1 | 37944.0 | 42.9 | 44.4 | 70.0 | 70.0 | 76.9 | 76.9 | 36.0 | 37.5 |
| DEX0449_054.nt.2 | 37943.0 | 46.4 | 46.4 | 70.0 | 70.0 | 76.9 | 76.9 | 40.0 | 40.0 |
| DEX0449_054.nt.2 | 37944.0 | 42.9 | 44.4 | 70.0 | 70.0 | 76.9 | 76.9 | 36.0 | 37.5 |
| DEX0449_055.nt.1 | 30951.0 | 67.9 | 67.9 | 60.0 | 60.0 | 100.0 | 100.0 | 48.0 | 48.0 |
| DEX0449_055.nt.1 | 30956.0 | 53.6 | 55.6 | 60.0 | 60.0 | 92.3 | 92.3 | 36.0 | 37.5 |
| DEX0449_055.nt.1 | 31201.0 | 67.9 | 67.9 | 60.0 | 60.0 | 100.0 | 100.0 | 48.0 | 48.0 |
| DEX0449_055.nt.2 | 30951.0 | 67.9 | 67.9 | 60.0 | 60.0 | 100.0 | 100.0 | 48.0 | 48.0 |
| DEX0449_055.nt.2 | 30956.0 | 53.6 | 55.6 | 60.0 | 60.0 | 92.3 | 92.3 | 36.0 | 37.5 |
| DEX0449_055.nt.2 | 31201.0 | 67.9 | 67.9 | 60.0 | 60.0 | 100.0 | 100.0 | 48.0 | 48.0 |
| DEX0449_055.nt.3 | 30951.0 | 67.9 | 67.9 | 60.0 | 60.0 | 100.0 | 100.0 | 48.0 | 48.0 |
| DEX0449_055.nt.3 | 30956.0 | 53.6 | 55.6 | 60.0 | 60.0 | 92.3 | 92.3 | 36.0 | 37.5 |
| DEX0449_055.nt.3 | 31201.0 | 67.9 | 67.9 | 60.0 | 60.0 | 100.0 | 100.0 | 48.0 | 48.0 |

[0466] TABLE 3

| | | | Cln | | Cln | | Cln |
|---|---|---|---|---|---|---|---|
| | | Cln | Multi- | Cln | Multi- | Cln | Multi- |
| | | Multi- | Cancer | Multi- | Cancer | Multi- | Cancer |
| | | Cancer | ALL | Cancer | ASC | Cancer | RS |
| | Oligo | ALL % up | % valid | ASC % up | % valid | RS % up | % valid |
| DEX ID | Name | n = 27 | up n = 27 | n = 14 | up n = 14 | n = 13 | up n = 13 |
| DEX0449_044.nt.1 | 78951.1 | 0.0 | 0.0 | 0.0 | 0.0 | 0.0 | 0.0 |
| DEX0449_044.nt.1 | 78952.0 | 0.0 | 0.0 | 0.0 | 0.0 | 0.0 | 0.0 |
| DEX0449_044.nt.1 | 78952.1 | 0.0 | 0.0 | 0.0 | 0.0 | 0.0 | 0.0 |
| DEX0449_044.nt.1 | 92319.0 | 0.0 | 0.0 | 0.0 | 0.0 | 0.0 | 0.0 |
| DEX0449_044.nt.1 | 92319.1 | 0.0 | 0.0 | 0.0 | 0.0 | 0.0 | 0.0 |
| DEX0449_044.nt.1 | 92320.0 | 0.0 | 0.0 | 0.0 | 0.0 | 0.0 | 0.0 |
| DEX0449_044.nt.1 | 92320.1 | 0.0 | 0.0 | 0.0 | 0.0 | 0.0 | 0.0 |
| DEX0449_044.nt.2 | 78951.0 | 0.0 | 0.0 | 0.0 | 0.0 | 0.0 | 0.0 |
| DEX0449_044.nt.2 | 78951.1 | 0.0 | 0.0 | 0.0 | 0.0 | 0.0 | 0.0 |
| DEX0449_044.nt.2 | 78952.0 | 0.0 | 0.0 | 0.0 | 0.0 | 0.0 | 0.0 |
| DEX0449_044.nt.2 | 78952.1 | 0.0 | 0.0 | 0.0 | 0.0 | 0.0 | 0.0 |
| DEX0449_044.nt.2 | 92319.0 | 0.0 | 0.0 | 0.0 | 0.0 | 0.0 | 0.0 |
| DEX0449_044.nt.2 | 92319.1 | 0.0 | 0.0 | 0.0 | 0.0 | 0.0 | 0.0 |
| DEX0449_044.nt.2 | 92320.0 | 0.0 | 0.0 | 0.0 | 0.0 | 0.0 | 0.0 |
| DEX0449_044.nt.2 | 92320.1 | 0.0 | 0.0 | 0.0 | 0.0 | 0.0 | 0.0 |
| DEX0449_044.nt.3 | 78951.0 | 0.0 | 0.0 | 0.0 | 0.0 | 0.0 | 0.0 |
| DEX0449_044.nt.3 | 78951.1 | 0.0 | 0.0 | 0.0 | 0.0 | 0.0 | 0.0 |
| DEX0449_044.nt.3 | 78952.0 | 0.0 | 0.0 | 0.0 | 0.0 | 0.0 | 0.0 |
| DEX0449_044.nt.3 | 78952.1 | 0.0 | 0.0 | 0.0 | 0.0 | 0.0 | 0.0 |
| DEX0449_044.nt.3 | 92319.0 | 0.0 | 0.0 | 0.0 | 0.0 | 0.0 | 0.0 |
| DEX0449_044.nt.3 | 92319.1 | 0.0 | 0.0 | 0.0 | 0.0 | 0.0 | 0.0 |
| DEX0449_044.nt.3 | 92320.0 | 0.0 | 0.0 | 0.0 | 0.0 | 0.0 | 0.0 |
| DEX0449_044.nt.3 | 92320.1 | 0.0 | 0.0 | 0.0 | 0.0 | 0.0 | 0.0 |
| DEX0449_044.nt.4 | 78951.0 | 0.0 | 0.0 | 0.0 | 0.0 | 0.0 | 0.0 |
| DEX0449_044.nt.4 | 78951.1 | 0.0 | 0.0 | 0.0 | 0.0 | 0.0 | 0.0 |
| DEX0449_044.nt.4 | 78952.0 | 0.0 | 0.0 | 0.0 | 0.0 | 0.0 | 0.0 |
| DEX0449_044.nt.4 | 78952.1 | 0.0 | 0.0 | 0.0 | 0.0 | 0.0 | 0.0 |
| DEX0449_044.nt.4 | 92319.0 | 0.0 | 0.0 | 0.0 | 0.0 | 0.0 | 0.0 |
| DEX0449_044.nt.4 | 92319.1 | 0.0 | 0.0 | 0.0 | 0.0 | 0.0 | 0.0 |
| DEX0449_044.nt.4 | 92320.0 | 0.0 | 0.0 | 0.0 | 0.0 | 0.0 | 0.0 |
| DEX0449_044.nt.4 | 92320.1 | 0.0 | 0.0 | 0.0 | 0.0 | 0.0 | 0.0 |
| DEX0449_045.nt.1 | 1045.0 | 25.9 | 25.9 | 14.3 | 14.3 | 38.5 | 38.5 |

[0467] Breast Cancer Chips

[0468] For breast cancer two different chip designs were evaluated with overlapping sets of a total of 36 samples, comparing the expression patterns of breast cancer derived polyA+RNA to polyA+RNA isolated from a pool of 10 normal breast tissues. For the Breast Array Chip, all 36 samples (9 stage I cancers, 23 stage II cancers, 4 stage III cancers) were analyzed. These samples also represented 10 Grade1/2 and 26 Grade 3 cancers. The histopathologic grades for cancer are classified as follows: GX, cannot be assessed; G1, well differentiated; G2, moderately differentiated; G3, poorly differentiated; and G4, undifferentiated. AJCC Cancer Staging Handbook, pp. 9, (5th Ed, 1998). Samples were further grouped based on the expression patterns of the known breast cancer associated genes Her2 and ERα (10 HEI) up, 26 HER2 not up, 20 ER up and 16 ER not up) and for the Multi-Cancer Array Chip, a subset of 20 of these samples (9 stage I cancers, 8 stage II cancers, 3 stage III cancers) were assessed.

[0469] No results for the statistically significant up-regulated genes on the Breast Array Chip are shown. The results for the statistically significant up-regulated genes on the Multi-Cancer Array Chip are shown in Table 4. The first two columns of each table contain information about the sequence itself (Seq ID, Oligo Name), the next columns show the results obtained for all (“ALL”) breast cancer samples, cancers corresponding to stageI (“ST1”), stages II and III (“ST2,3”), grades 1 and 2 (“GR1,2”), grade 3 (“GR3”), cancers exhibiting up-regulation of Her2 (“HER2up”) or ERα (“ERup”) or those not exhibiting up-regulation of Her2 (“NOT HER2up”) or ERα (“NOT ERup”). ‘% up’ indicates the percentage of all experiments in which up-regulation of at least 2-fold was observed (n=36 for Colon Array Chip, n=20 for the Multi-Cancer Array Chip), ‘% valid up’ indicates the percentage of experiments with valid expression values in which up-regulation of at least 2-fold was observed.

TABLE 4

| | | | Mam | | Mam | Mam | Mam |
|---|---|---|---|---|---|---|---|
| | | Mam | Multi- | Mam | Multi- | Multi- | Multi- |
| | | Multi- | Cancer | Multi- | Cancer | Cancer | Cancer |
| | | Cancer | ALL | Cancer | ST1 | ST2,3 | ST2,3 |
| | Oligo | ALL % up | % valid | ST1 % up | % valid | % up | % valid |
| DEX ID | Name | n = 20 | up n = 20 | n = 9 | up n = 9 | n = 11 | up n = 11 |
| DEX0449_044.nt.1 | 78951.1 | 5.0 | 14.3 | 0.0 | 0.0 | 9.1 | 16.7 |
| DEX0449_044.nt.1 | 78952.0 | 0.0 | 0.0 | 0.0 | 0.0 | 0.0 | 0.0 |
| DEX0449_044.nt.1 | 78952.1 | 5.0 | 14.3 | 0.0 | 0.0 | 9.1 | 16.7 |
| DEX0449_044.nt.1 | 92319.0 | 0.0 | 0.0 | 0.0 | 0.0 | 0.0 | 0.0 |
| DEX0449_044.nt.1 | 92319.1 | 0.0 | 0.0 | 0.0 | 0.0 | 0.0 | 0.0 |
| DEX0449_044.nt.1 | 92320.0 | 0.0 | 0.0 | 0.0 | 0.0 | 0.0 | 0.0 |
| DEX0449_044.nt.1 | 92320.1 | 0.0 | 0.0 | 0.0 | 0.0 | 0.0 | 0.0 |
| DEX0449_044.nt.2 | 78951.0 | 0.0 | 0.0 | 0.0 | 0.0 | 0.0 | 0.0 |
| DEX0449_044.nt.2 | 78951.1 | 5.0 | 14.3 | 0.0 | 0.0 | 9.1 | 16.7 |
| DEX0449_044.nt.2 | 78952.0 | 0.0 | 0.0 | 0.0 | 0.0 | 0.0 | 0.0 |
| DEX0449_044.nt.2 | 78952.1 | 5.0 | 14.3 | 0.0 | 0.0 | 9.1 | 16.7 |
| DEX0449_044.nt.2 | 92319.0 | 0.0 | 0.0 | 0.0 | 0.0 | 0.0 | 0.0 |
| DEX0449_044.nt.2 | 92319.1 | 0.0 | 0.0 | 0.0 | 0.0 | 0.0 | 0.0 |
| DEX0449_044.nt.2 | 92320.0 | 0.0 | 0.0 | 0.0 | 0.0 | 0.0 | 0.0 |
| DEX0449_044.nt.2 | 92320.1 | 0.0 | 0.0 | 0.0 | 0.0 | 0.0 | 0.0 |
| DEX0449_044.nt.3 | 78951.0 | 0.0 | 0.0 | 0.0 | 0.0 | 0.0 | 0.0 |
| DEX0449_044.nt.3 | 78951.1 | 5.0 | 14.3 | 0.0 | 0.0 | 9.1 | 16.7 |
| DEX0449_044.nt.3 | 78952.0 | 0.0 | 0.0 | 0.0 | 0.0 | 0.0 | 0.0 |
| DEX0449_044.nt.3 | 78952.1 | 5.0 | 14.3 | 0.0 | 0.0 | 9.1 | 16.7 |
| DEX0449_044.nt.3 | 92319.0 | 0.0 | 0.0 | 0.0 | 0.0 | 0.0 | 0.0 |
| DEX0449_044.nt.3 | 92319.1 | 0.0 | 0.0 | 0.0 | 0.0 | 0.0 | 0.0 |
| DEX0449_044.nt.3 | 92320.0 | 0.0 | 0.0 | 0.0 | 0.0 | 0.0 | 0.0 |
| DEX0449_044.nt.3 | 92320.1 | 0.0 | 0.0 | 0.0 | 0.0 | 0.0 | 0.0 |
| DEX0449_044.nt.4 | 78951.0 | 0.0 | 0.0 | 0.0 | 0.0 | 0.0 | 0.0 |
| DEX0449_044.nt.4 | 78951.1 | 5.0 | 14.3 | 0.0 | 0.0 | 9.1 | 16.7 |
| DEX0449_044.nt.4 | 78952.0 | 0.0 | 0.0 | 0.0 | 0.0 | 0.0 | 0.0 |
| DEX0449_044.nt.4 | 78952.1 | 5.0 | 14.3 | 0.0 | 0.0 | 9.1 | 16.7 |
| DEX0449_044.nt.4 | 92319.0 | 0.0 | 0.0 | 0.0 | 0.0 | 0.0 | 0.0 |
| DEX0449_044.nt.4 | 92319.1 | 0.0 | 0.0 | 0.0 | 0.0 | 0.0 | 0.0 |
| DEX0449_044.nt.4 | 92320.0 | 0.0 | 0.0 | 0.0 | 0.0 | 0.0 | 0.0 |
| DEX0449_044.nt.4 | 92320.1 | 0.0 | 0.0 | 0.0 | 0.0 | 0.0 | 0.0 |
| DEX0449_045.nt.1 | 1045.0 | 0.0 | 0.0 | 0.0 | 0.0 | 0.0 | 0.0 |

[0470] Lung Cancer Chips

[0471] For lung cancer two different chip designs were evaluated with overlapping sets of a total of 29 samples, comparing the expression patterns of lung cancer derived polyA+RNA to polyA+RNA isolated from a pool of 12 normal lung tissues. For the Lung Array Chip all 29 samples (15 squamous cell carcinomas and 14 adenocarcinomas including 14 stage I and 15 stage III cancers) were analyzed and for the Multi-Cancer Array Chip a subset of 22 of these samples (10 squamous cell carcinomas, 12 adenocarcinomas) were assessed.

[0472] The results for the statistically significant up-regulated genes on the Lung Array Chip are shown in Table 5. The results for the statistically significant up-regulated genes on the Multi-Cancer Array Chip are shown in Table 6. The first two columns of each table contain information about the sequence itself (DEX ID, Oligo Name), the next columns show the results obtained for all (“ALL”) lung cancer samples, squamous cell carcinomas (“SQ”), adenocarcinomas (“AD”), or cancers corresponding to stage I (“ST1”), or stages II and III (“ST2,3”). ‘% up’ indicates the percentage of all experiments in which up-regulation of at least 2-fold was observed (n=29 for Lung Array Chip, n=22 for Multi-Cancer Array Chip), ‘% valid up’ indicates the percentage of experiments with valid expression values in which up-regulation of at least 2-fold was observed.

TABLE 5

| | | | Lng | | | | | | Lng | | Lng |
|---|---|---|---|---|---|---|---|---|---|---|---|
| | | Lng | ALL | Lng | Lng SQ | Lng | Lng AD | Lng | ST1 | Lng | ST2,3 |
| | | ALL | % valid | SQ | % valid | AD | % valid | ST1 | % valid | ST2,3 | % valid |
| | Oligo | % up | up | % up | up | % up | up | % up | up | % up | up |
| DEX ID | Name | n = 29 | n = 29 | n = 15 | n = 15 | n = 14 | n = 14 | n = 14 | n = 14 | n = 15 | n = 15 |
| DEX0449_045.nt.1 | 1044.0 | 13.8 | 13.8 | 13.3 | 13.3 | 14.3 | 14.3 | 14.3 | 14.3 | 13.3 | 13.3 |
| DEX0449_052.nt.1 | 5819.0 | 6.9 | 7.1 | 6.7 | 6.7 | 7.1 | 7.7 | 7.1 | 7.7 | 6.7 | 6.7 |
| DEX0449_052.nt.1 | 5820.0 | 6.9 | 6.9 | 6.7 | 6.7 | 7.1 | 7.1 | 7.1 | 7.1 | 6.7 | 6.7 |
| DEX0449_054.nt.1 | 6889.0 | 0.0 | 0.0 | 0.0 | 0.0 | 0.0 | 0.0 | 0.0 | 0.0 | 0.0 | 0.0 |
| DEX0449_054.nt.1 | 6890.0 | 6.9 | 7.1 | 6.7 | 7.1 | 7.1 | 7.1 | 14.3 | 15.4 | 0.0 | 0.0 |
| DEX0449_054.nt.2 | 6889.0 | 0.0 | 0.0 | 0.0 | 0.0 | 0.0 | 0.0 | 0.0 | 0.0 | 0.0 | 0.0 |
| DEX0449_054.nt.2 | 6890.0 | 6.9 | 7.1 | 6.7 | 7.1 | 7.1 | 7.1 | 14.3 | 15.4 | 0.0 | 0.0 |

[0473] TABLE 6

| | | | Lng | | Lng | | Lng |
|---|---|---|---|---|---|---|---|
| | | Lng | Multi- | Lng | Multi- | Lng | Multi- |
| | | Multi- | Cancer | Multi- | Cancer | Multi- | Cancer |
| | | Cancer | ALL | Cancer | SQ | Cancer | AD |
| | Oligo | ALL % up | % valid | SQ % up | % valid | AD % up | % valid |
| DEX ID | Name | n = 22 | up n = 22 | n = 10 | up n = 10 | n = 12 | up n = 12 |
| DEX0449_044.nt.1 | 78951.1 | 0.0 | 0.0 | 0.0 | 0.0 | 0.0 | 0.0 |
| DEX0449_044.nt.1 | 78952.0 | 4.5 | 33.3 | 10.0 | 50.0 | 0.0 | 0.0 |
| DEX0449_044.nt.1 | 78952.1 | 0.0 | 0.0 | 0.0 | 0.0 | 0.0 | 0.0 |
| DEX0449_044.nt.1 | 92319.0 | 0.0 | 0.0 | 0.0 | 0.0 | 0.0 | 0.0 |
| DEX0449_044.nt.1 | 92319.1 | 0.0 | 0.0 | 0.0 | 0.0 | 0.0 | 0.0 |
| DEX0449_044.nt.1 | 92320.0 | 0.0 | 0.0 | 0.0 | 0.0 | 0.0 | 0.0 |
| DEX0449_044.nt.1 | 92320.1 | 0.0 | 0.0 | 0.0 | 0.0 | 0.0 | 0.0 |
| DEX0449_044.nt.2 | 78951.0 | 0.0 | 0.0 | 0.0 | 0.0 | 0.0 | 0.0 |
| DEX0449_044.nt.2 | 78951.1 | 0.0 | 0.0 | 0.0 | 0.0 | 0.0 | 0.0 |
| DEX0449_044.nt.2 | 78952.0 | 4.5 | 33.3 | 10.0 | 50.0 | 0.0 | 0.0 |
| DEX0449_044.nt.2 | 78952.1 | 0.0 | 0.0 | 0.0 | 0.0 | 0.0 | 0.0 |
| DEX0449_044.nt.2 | 92319.0 | 0.0 | 0.0 | 0.0 | 0.0 | 0.0 | 0.0 |
| DEX0449_044.nt.2 | 92319.1 | 0.0 | 0.0 | 0.0 | 0.0 | 0.0 | 0.0 |
| DEX0449_044.nt.2 | 92320.0 | 0.0 | 0.0 | 0.0 | 0.0 | 0.0 | 0.0 |
| DEX0449_044.nt.2 | 92320.1 | 0.0 | 0.0 | 0.0 | 0.0 | 0.0 | 0.0 |
| DEX0449_044.nt.3 | 78951.0 | 0.0 | 0.0 | 0.0 | 0.0 | 0.0 | 0.0 |
| DEX0449_044.nt.3 | 78951.1 | 0.0 | 0.0 | 0.0 | 0.0 | 0.0 | 0.0 |
| DEX0449_044.nt.3 | 78952.0 | 4.5 | 33.3 | 10.0 | 50.0 | 0.0 | 0.0 |
| DEX0449_044.nt.3 | 78952.1 | 0.0 | 0.0 | 0.0 | 0.0 | 0.0 | 0.0 |
| DEX0449_044.nt.3 | 92319.0 | 0.0 | 0.0 | 0.0 | 0.0 | 0.0 | 0.0 |
| DEX0449_044.nt.3 | 92319.1 | 0.0 | 0.0 | 0.0 | 0.0 | 0.0 | 0.0 |
| DEX0449_044.nt.3 | 92320.0 | 0.0 | 0.0 | 0.0 | 0.0 | 0.0 | 0.0 |
| DEX0449_044.nt.3 | 92320.1 | 0.0 | 0.0 | 0.0 | 0.0 | 0.0 | 0.0 |
| DEX0449_044.nt.4 | 78951.0 | 0.0 | 0.0 | 0.0 | 0.0 | 0.0 | 0.0 |
| DEX0449_044.nt.4 | 78951.1 | 0.0 | 0.0 | 0.0 | 0.0 | 0.0 | 0.0 |
| DEX0449_044.nt.4 | 78952.0 | 4.5 | 33.3 | 10.0 | 50.0 | 0.0 | 0.0 |
| DEX0449_044.nt.4 | 78952.1 | 0.0 | 0.0 | 0.0 | 0.0 | 0.0 | 0.0 |
| DEX0449_044.nt.4 | 92319.0 | 0.0 | 0.0 | 0.0 | 0.0 | 0.0 | 0.0 |
| DEX0449_044.nt.4 | 92319.1 | 0.0 | 0.0 | 0.0 | 0.0 | 0.0 | 0.0 |
| DEX0449_044.nt.4 | 92320.0 | 0.0 | 0.0 | 0.0 | 0.0 | 0.0 | 0.0 |
| DEX0449_044.nt.4 | 92320.1 | 0.0 | 0.0 | 0.0 | 0.0 | 0.0 | 0.0 |
| DEX0449_045.nt.1 | 1045.0 | 4.5 | 4.5 | 0.0 | 0.0 | 8.3 | 8.3 |

[0474] Ovarian Cancer Chips

[0475] For ovarian cancer two different chip designs were evaluated with overlapping sets of a total of 19 samples, comparing the expression patterns of ovarian cancer derived total RNA to total RNA isolated from a pool of 9 normal ovarian tissues. For the Multi-Cancer Array Chip, all 19 samples (14 invasive carcinomas, 5 low malignant potential samples were analyzed and for the Ovarian Array Chip, a subset of 17 of these samples (13 invasive carcinomas, 4 low malignant potential samples) were assessed.

[0476] No results for the statistically significant up-regulated genes on the Ovarian Array Chip are shown. The results for the Multi-Cancer Array Chip are shown in Table 7. The first two columns of each table contain information about the sequence itself (DEX ID, Oligo Name), the next columns show the results obtained for all (“ALL”) ovarian cancer samples, invasive carcinomas (“INV”) and low malignant potential (“LMP”) samples. ‘% up’ indicates the percentage of all experiments in which up-regulation of at least 2-fold was observed (n=19 for the Multi-Cancer Array Chip, n=17 for the Ovarian Array Chip), ‘% valid up’ indicates the percentage of experiments with valid expression values in which up-regulation of at least 2-fold was observed.

TABLE 7

| | | | Ovr | | Ovr | | Ovr |
|---|---|---|---|---|---|---|---|
| | | Ovr | Multi- | Ovr | Multi- | Ovr | Multi- |
| | | Multi- | Cancer | Multi- | Cancer | Multi- | Cancer |
| | | Cancer | ALL | Cancer | INV | Cancer | LMP |
| | Oligo | ALL % up | % valid | INV % up | % valid | LMP % up | % valid |
| DEX ID | Name | n = 19 | up n = 19 | n = 14 | up n = 14 | n = 5 | up n = 5 |
| DEX0449_044.nt.1 | 78951.1 | 0.0 | 0.0 | 0.0 | 0.0 | 0.0 | 0.0 |
| DEX0449_044.nt.1 | 78952.0 | 5.3 | 12.5 | 7.1 | 16.7 | 0.0 | 0.0 |
| DEX0449_044.nt.1 | 78952.1 | 5.3 | 12.5 | 7.1 | 14.3 | 0.0 | 0.0 |
| DEX0449_044.nt.1 | 92319.0 | 0.0 | 0.0 | 0.0 | 0.0 | 0.0 | 0.0 |
| DEX0449_044.nt.1 | 92319.1 | 0.0 | 0.0 | 0.0 | 0.0 | 0.0 | 0.0 |
| DEX0449_044.nt.1 | 92320.0 | 0.0 | 0.0 | 0.0 | 0.0 | 0.0 | 0.0 |
| DEX0449_044.nt.1 | 92320.1 | 0.0 | 0.0 | 0.0 | 0.0 | 0.0 | 0.0 |
| DEX0449_044.nt.2 | 78951.0 | 0.0 | 0.0 | 0.0 | 0.0 | 0.0 | 0.0 |
| DEX0449_044.nt.2 | 78951.1 | 0.0 | 0.0 | 0.0 | 0.0 | 0.0 | 0.0 |
| DEX0449_044.nt.2 | 78952.0 | 5.3 | 12.5 | 7.1 | 16.7 | 0.0 | 0.0 |
| DEX0449_044.nt.2 | 78952.1 | 5.3 | 12.5 | 7.1 | 14.3 | 0.0 | 0.0 |
| DEX0449_044.nt.2 | 92319.0 | 0.0 | 0.0 | 0.0 | 0.0 | 0.0 | 0.0 |
| DEX0449_044.nt.2 | 92319.1 | 0.0 | 0.0 | 0.0 | 0.0 | 0.0 | 0.0 |
| DEX0449_044.nt.2 | 92320.0 | 0.0 | 0.0 | 0.0 | 0.0 | 0.0 | 0.0 |
| DEX0449_044.nt.2 | 92320.1 | 0.0 | 0.0 | 0.0 | 0.0 | 0.0 | 0.0 |
| DEX0449_044.nt.3 | 78951.0 | 0.0 | 0.0 | 0.0 | 0.0 | 0.0 | 0.0 |
| DEX0449_044.nt.3 | 78951.1 | 0.0 | 0.0 | 0.0 | 0.0 | 0.0 | 0.0 |
| DEX0449_044.nt.3 | 78952.0 | 5.3 | 12.5 | 7.1 | 16.7 | 0.0 | 0.0 |
| DEX0449_044.nt.3 | 78952.1 | 5.3 | 12.5 | 7.1 | 14.3 | 0.0 | 0.0 |
| DEX0449_044.nt.3 | 92319.0 | 0.0 | 0.0 | 0.0 | 0.0 | 0.0 | 0.0 |
| DEX0449_044.nt.3 | 92319.1 | 0.0 | 0.0 | 0.0 | 0.0 | 0.0 | 0.0 |
| DEX0449_044.nt.3 | 92320.0 | 0.0 | 0.0 | 0.0 | 0.0 | 0.0 | 0.0 |
| DEX0449_044.nt.3 | 92320.1 | 0.0 | 0.0 | 0.0 | 0.0 | 0.0 | 0.0 |
| DEX0449_044.nt.4 | 78951.0 | 0.0 | 0.0 | 0.0 | 0.0 | 0.0 | 0.0 |
| DEX0449_044.nt.4 | 78951.1 | 0.0 | 0.0 | 0.0 | 0.0 | 0.0 | 0.0 |
| DEX0449_044.nt.4 | 78952.0 | 5.3 | 12.5 | 7.1 | 16.7 | 0.0 | 0.0 |
| DEX0449_044.nt.4 | 78952.1 | 5.3 | 12.5 | 7.1 | 14.3 | 0.0 | 0.0 |
| DEX0449_044.nt.4 | 92319.0 | 0.0 | 0.0 | 0.0 | 0.0 | 0.0 | 0.0 |
| DEX0449_044.nt.4 | 92319.1 | 0.0 | 0.0 | 0.0 | 0.0 | 0.0 | 0.0 |
| DEX0449_044.nt.4 | 92320.0 | 0.0 | 0.0 | 0.0 | 0.0 | 0.0 | 0.0 |
| DEX0449_044.nt.4 | 92320.1 | 0.0 | 0.0 | 0.0 | 0.0 | 0.0 | 0.0 |
| DEX0449_045.nt.1 | 1045.0 | 0.0 | 0.0 | 0.0 | 0.0 | 0.0 | 0.0 |

[0477] Prostate Cancer

[0478] For prostate cancer three different chip designs were evaluated with overlapping sets of a total of 29 samples, comparing the expression patterns of prostate cancer or benign disease derived total RNA to total RNA isolated from a pool of 35 normal prostate tissues. For the Prostate 1 Array and Prostate 2 Array Chips all 29 samples (17 prostate cancer samples, 12 non-malignant disease samples) were analyzed. For the Multi-Cancer Array Chip a subset of 28 of these samples (16 prostate cancer samples, 12 non-malignant disease samples) were analyzed.

[0479] The results for the statistically significant up-regulated genes on the Prostate1 Array Chip and the Prostate2 Array Chip are shown in Table 8. The results for the statistically significant up-regulated genes on the Multi-Cancer Array Chip are shown in Table 9. The first two columns of each table contain information about the sequence itself (DEX ID, Oligo Name), the next columns show the results obtained for prostate cancer samples (“CAN”) or non-malignant disease samples (“DIS”). ‘% up’ indicates the percentage of all experiments in which up-regulation of at least 2-fold was observed (n=29 for the Prostate1 Array Chip and the Multi-Cancer Array Chip), ‘% valid up’ indicates the percentage of experiments with valid expression values in which up-regulation of at least 2-fold was observed.

TABLE 8

| | | Pro | | | Pro DIS |
|---|---|---|---|---|---|
| | | CAN | Pro CAN | Pro DIS | % |
| | Oligo | % up | % valid up | % up | valid up |
| DEX ID | Name | n = 17 | n = 17 | n = 12 | n = 12 |
| DEX0449_045.nt.1 | 27017.01 | 0.0 | 0.0 | 0.0 | 0.0 |
| DEX0449_045.nt.1 | 27017.02 | 0.0 | 0.0 | 0.0 | 0.0 |
| DEX0449_045.nt.1 | 28249.01 | 0.0 | 0.0 | 0.0 | 0.0 |
| DEX0449_045.nt.1 | 28249.02 | 0.0 | 0.0 | 0.0 | 0.0 |
| DEX0449_045.nt.3 | 27017.01 | 0.0 | 0.0 | 0.0 | 0.0 |
| DEX0449_045.nt.3 | 27017.02 | 0.0 | 0.0 | 0.0 | 0.0 |
| DEX0449_047.nt.1 | 31094.01 | 0.0 | 0.0 | 0.0 | 0.0 |
| DEX0449_047.nt.1 | 31094.02 | 0.0 | 0.0 | 0.0 | 0.0 |
| DEX0449_047.nt.1 | 31094.03 | 0.0 | 0.0 | 0.0 | 0.0 |
| DEX0449_047.nt.1 | 33588.01 | 5.9 | 8.3 | 0.0 | 0.0 |
| DEX0449_047.nt.1 | 33588.02 | 0.0 | 0.0 | 0.0 | 0.0 |
| DEX0449_047.nt.2 | 31094.01 | 0.0 | 0.0 | 0.0 | 0.0 |
| DEX0449_047.nt.2 | 31094.02 | 0.0 | 0.0 | 0.0 | 0.0 |
| DEX0449_047.nt.2 | 31094.03 | 0.0 | 0.0 | 0.0 | 0.0 |
| DEX0449_047.nt.2 | 33588.01 | 5.9 | 8.3 | 0.0 | 0.0 |
| DEX0449_047.nt.2 | 33588.02 | 0.0 | 0.0 | 0.0 | 0.0 |
| DEX0449_051.nt.1 | 35746.01 | 0.0 | 0.0 | 0.0 | 0.0 |
| DEX0449_051.nt.1 | 35746.02 | 0.0 | 0.0 | 0.0 | 0.0 |
| DEX0449_051.nt.1 | 35746.03 | 0.0 | 0.0 | 0.0 | 0.0 |
| DEX0449_051.nt.1 | 35788.01 | 0.0 | 00 | 0.0 | 0.0 |
| DEX0449_051.nt.1 | 35788.02 | 0.0 | 0.0 | 0.0 | 0.0 |
| DEX0449_051.nt.1 | 35788.03 | 0.0 | 0.0 | 0.0 | 0.0 |

[0480] TABLE 9

| | | | Pro Multi- | | Pro Multi- |
|---|---|---|---|---|---|
| | | Pro Multi- | Cancer CAN | Pro Multi- | Cancer DIS |
| | Oligo | Cancer CAN | % valid up | Cancer DIS | % valid up |
| DEX ID | Name | % up n = 16 | n = 16 | % up n = 12 | n = 12 |
| DEX0449_044.nt.1 | 78951.1 | 0.0 | 0.0 | 0.0 | 0.0 |
| DEX0449_044.nt.1 | 78952.0 | 5.9 | 7.7 | 0.0 | 0.0 |
| DEX0449_044.nt.1 | 78952.1 | 5.9 | 7.1 | 0.0 | 0.0 |
| DEX0449_044.nt.1 | 92319.0 | 0.0 | 0.0 | 0.0 | 0.0 |
| DEX0449_044.nt.1 | 92319.1 | 0.0 | 0.0 | 0.0 | 0.0 |
| DEX0449_044.nt.1 | 92320.0 | 0.0 | 0.0 | 0.0 | 0.0 |
| DEX0449_044.nt.1 | 92320.1 | 0.0 | 0.0 | 0.0 | 0.0 |
| DEX0449_044.nt.2 | 78951.0 | 0.0 | 0.0 | 0.0 | 0.0 |
| DEX0449_044.nt.2 | 78951.1 | 0.0 | 0.0 | 0.0 | 0.0 |
| DEX0449_044.nt.2 | 78952.0 | 5.9 | 7.7 | 0.0 | 0.0 |
| DEX0449_044.nt.2 | 78952.1 | 5.9 | 7.1 | 0.0 | 0.0 |
| DEX0449_044.nt.2 | 92319.0 | 0.0 | 0.0 | 0.0 | 0.0 |
| DEX0449_044.nt.2 | 92319.1 | 0.0 | 0.0 | 0.0 | 0.0 |
| DEX0449_044.nt.2 | 92320.0 | 0.0 | 0.0 | 0.0 | 0.0 |
| DEX0449_044.nt.2 | 92320.1 | 0.0 | 0.0 | 0.0 | 0.0 |
| DEX0449_044.nt.3 | 78951.0 | 0.0 | 0.0 | 0.0 | 0.0 |
| DEX0449_044.nt.3 | 78951.1 | 0.0 | 0.0 | 0.0 | 0.0 |
| DEX0449_044.nt.3 | 78952.0 | 5.9 | 7.7 | 0.0 | 0.0 |
| DEX0449_044.nt.3 | 78952.1 | 5.9 | 7.1 | 0.0 | 0.0 |
| DEX0449_044.nt.3 | 92319.0 | 0.0 | 0.0 | 0.0 | 0.0 |
| DEX0449_044.nt.3 | 92319.1 | 0.0 | 0.0 | 0.0 | 0.0 |
| DEX0449_044.nt.3 | 92320.0 | 0.0 | 0.0 | 0.0 | 0.0 |
| DEX0449_044.nt.3 | 92320.1 | 0.0 | 0.0 | 0.0 | 0.0 |
| DEX0449_044.nt.4 | 78951.0 | 0.0 | 0.0 | 0.0 | 0.0 |
| DEX0449_044.nt.4 | 78951.1 | 0.0 | 0.0 | 0.0 | 0.0 |
| DEX0449_044.nt.4 | 78952.0 | 5.9 | 7.7 | 0.0 | 0.0 |
| DEX0449_044.nt.4 | 78952.1 | 5.9 | 7.1 | 0.0 | 0.0 |
| DEX0449_044.nt.4 | 92319.0 | 0.0 | 0.0 | 0.0 | 0.0 |
| DEX0449_044.nt.4 | 92319.1 | 0.0 | 0.0 | 0.0 | 0.0 |
| DEX0449_044.nt.4 | 92320.0 | 0.0 | 0.0 | 0.0 | 0.0 |
| DEX0449_044.nt.4 | 92320.1 | 0.0 | 0.0 | 0.0 | 0.0 |
| DEX0449_045.nt.1 | 1045.0 | 0.0 | 0.0 | 0.0 | 0.0 |

SEQ ID NO: 1-112 was up-regulated on various tissue microarrays. Accordingly, nucleotide SEQ ID NO: 1-112 or the encoded protein SEQ ID NO: 113-259 may be used as a cancer therapeutic and/or diagnostic target for the tissues in which expression is shown.

[0481] The following table lists the location (Oligo Location) where the microarray oligos (Oligo ID) map on the transcripts (DEX ID) of the present invention. Each Oligo ID may have been printed multiple times on a single chip as replicates. The Oligo Name is an exemplary replicate (e.g. 1000.01) for the Oligo ID (e.g. 1000), and data from other replicates (e.g. 1000.02, 1000.03) may be reported. Additionally, the Array (Chip Name) that each oligo and oligo replicates were printed on is included.

| DEX NT ID | Oligo ID | Oligo Name | Chip Name | Oligo Location |
|---|---|---|---|---|
| DEX0449_001.nt.1 | 10296 | 10296.0 | Colon array | 1034-1093 |
| DEX0449_001.nt.1 | 10297 | 10297.0 | Colon array | 287-346 |
| DEX0449_044.nt.1 | 78952 | 78952.0 | Multi-Cancer array | 428-487 |
| DEX0449_044.nt.1 | 33264 | 33264.0 | Colon array | 405-464 |
| DEX0449_044.nt.1 | 92319 | 92319.0 | Multi-Cancer array | 546-605 |
| DEX0449_044.nt.1 | 78951 | 78951.0 | Multi-Cancer array | 425-484 |
| DEX0449_044.nt.1 | 33265 | 33265.0 | Colon array | 356-415 |
| DEX0449_044.nt.1 | 92320 | 92320.0 | Multi-Cancer array | 526-585 |
| DEX0449_044.nt.2 | 92319 | 92319.0 | Multi-Cancer array | 592-651 |
| DEX0449_044.nt.2 | 92320 | 92320.0 | Multi-Cancer array | 572-631 |
| DEX0449_044.nt.2 | 33264 | 33264.0 | Colon array | 451-510 |
| DEX0449_044.nt.2 | 78952 | 78952.0 | Multi-Cancer array | 474-533 |
| DEX0449_044.nt.2 | 33265 | 33265.0 | Colon array | 402-461 |
| DEX0449_044.nt.2 | 78951 | 78951.0 | Multi-Cancer array | 471-530 |
| DEX0449_044.nt.3 | 92320 | 92320.0 | Multi-Cancer array | 359-418 |
| DEX0449_044.nt.3 | 33265 | 33265.0 | Colon array | 189-248 |
| DEX0449_044.nt.3 | 78952 | 78952.0 | Multi-Cancer array | 261-320 |
| DEX0449_044.nt.3 | 33264 | 33264.0 | Colon array | 238-297 |
| DEX0449_044.nt.3 | 78951 | 78951.0 | Multi-Cancer array | 258-317 |
| DEX0449_044.nt.3 | 92319 | 92319.0 | Multi-Cancer array | 379-438 |
| DEX0449_044.nt.4 | 92320 | 92320.0 | Multi-Cancer array | 335-394 |
| DEX0449_044.nt.4 | 78952 | 78952.0 | Multi-Cancer array | 237-296 |
| DEX0449_044.nt.4 | 33265 | 33265.0 | Colon array | 165-224 |
| DEX0449_044.nt.4 | 92319 | 92319.0 | Multi-Cancer array | 355-414 |
| DEX0449_044.nt.4 | 33264 | 33264.0 | Colon array | 214-273 |
| DEX0449_044.nt.4 | 78951 | 78951.0 | Multi-Cancer array | 234-293 |
| DEX0449_045.nt.1 | 1044 | 1044.0 | Lung array | 175-234 |
| DEX0449_045.nt.1 | 27017 | 27017.01 | Prostate1 array | 1043-1102 |
| DEX0449_045.nt.1 | 1045 | 1045.0 | Multi-Cancer array | 165-224 |
| DEX0449_045.nt.1 | 28249 | 28249.02 | Prostate1 array | 323-382 |
| DEX0449_045.nt.2 | 1044 | 1044.0 | Lung array | 175-234 |
| DEX0449_045.nt.2 | 1045 | 1045.0 | Multi-Cancer array | 165-224 |
| DEX0449_045.nt.3 | 1044 | 1044.0 | Lung array | 160-219 |
| DEX0449_045.nt.3 | 27017 | 27017.01 | Prostate1 array | 1613-1672 |
| DEX0449_045.nt.3 | 1045 | 1045.0 | Multi-Cancer array | 150-209 |
| DEX0449_046.nt.1 | 33720 | 33720.0 | Colon array | 1037-1096 |
| DEX0449_047.nt.1 | 12809 | 12809.0 | Colon array | 2811-2870 |
| DEX0449_047.nt.1 | 33588 | 33588.01 | Prostate1 array | 2797-2856 |
| DEX0449_047.nt.1 | 12810 | 12810.0 | Colon array | 2773-2832 |
| DEX0449_047.nt.1 | 31094 | 31094.02 | Prostate2 array | 2319-2378 |
| DEX0449_047.nt.2 | 12810 | 12810.0 | Colon array | 2773-2832 |
| DEX0449_047.nt.2 | 33588 | 33588.01 | Prostate1 array | 2797-2856 |
| DEX0449_047.nt.2 | 31094 | 31094.02 | Prostate2 array | 2319-2378 |
| DEX0449_047.nt.2 | 12809 | 12809.0 | Colon array | 2811-2870 |
| DEX0449_048.nt.1 | 28637 | 28637.0 | Colon array | 357-416 |
| DEX0449_048.nt.1 | 28638 | 28638.0 | Colon array | 216-275 |
| DEX0449_049.nt.1 | 10224 | 10224.0 | Colon array | 360-419 |
| DEX0449_049.nt.1 | 10225 | 10225.0 | Colon array | 242-301 |
| DEX0449_051.nt.1 | 35788 | 35788.03 | Prostate2 array | 1107-1166 |
| DEX0449_051.nt.1 | 28403 | 28403.0 | Colon array | 1107-1166 |
| DEX0449_051.nt.1 | 35746 | 35746.02 | Prostate2 array | 893-952 |
| DEX0449_052.nt.1 | 5820 | 5820.0 | Lung array | 1714-1773 |
| DEX0449_052.nt.1 | 16385 | 16385.0 | Colon array | 2216-2275 |
| DEX0449_052.nt.1 | 5819 | 5819.0 | Lung array | 1865-1924 |
| DEX0449_053.nt.1 | 17655 | 17655.0 | Colon array | 1536-1595 |
| DEX0449_053.nt.1 | 17654 | 17654.0 | Colon array | 1600-1659 |
| DEX0449_053.nt.2 | 17655 | 17655.0 | Colon array | 1055-1114 |
| DEX0449_053.nt.2 | 17654 | 17654.0 | Colon array | 1119-1178 |
| DEX0449_054.nt.1 | 37944 | 37944.0 | Colon array | 1296-1355 |
| DEX0449_054.nt.1 | 6889 | 6889.0 | Lung array | 3086-3145 |
| DEX0449_054.nt.1 | 6890 | 6890.0 | Lung array | 2956-3015 |
| DEX0449_054.nt.1 | 37943 | 37943.0 | Colon array | 1416-1475 |
| DEX0449_054.nt.2 | 6889 | 6889.0 | Lung array | 2461-2520 |
| DEX0449_054.nt.2 | 37944 | 37944.0 | Colon array | 671-730 |
| DEX0449_054.nt.2 | 6890 | 6890.0 | Lung array | 2331-2390 |
| DEX0449_055.nt.1 | 30956 | 30956.0 | Colon array | 4398-4457 |
| DEX0449_055.nt.1 | 31201 | 31201.0 | Colon array | 4333-4392 |
| DEX0449_055.nt.1 | 30951 | 30951.0 | Colon array | 4334-4393 |
| DEX0449_055.nt.2 | 30956 | 30956.0 | Colon array | 1809-1868 |
| DEX0449_055.nt.2 | 31201 | 31201.0 | Colon array | 1744-1803 |
| DEX0449_055.nt.3 | 30951 | 30951.0 | Colon array | 3899-3958 |
| DEX0449_055.nt.3 | 30956 | 30956.0 | Colon array | 3963-4022 |

### Example 2b

### Relative Quantitation of Gene Expression

[0482] Real-Time quantitative PCR with fluorescent Taqman® probes is a quantitation detection system utilizing the 5′-3′ nuclease activity of Taq DNA polymerase. The method uses an internal fluorescent oligonucleotide probe (Taqman®) labeled with a 5′ reporter dye and a downstream, 3′ quencher dye. During PCR, the 5′-3′ nuclease activity of Taq DNA polymerase releases the reporter, whose fluorescence can then be detected by the laser detector of the Model 7700 Sequence Detection System (PE Applied Biosystems, Foster City, Calif., USA). Amplification of an endogenous control is used to standardize the amount of sample RNA added to the reaction and normalize for Reverse Transcriptase (RT) efficiency. Either cyclophilin, glyceraldehyde-3-phosphate dehydrogenase (GAPDH), ATPase, or 18S ribosomal RNA (rRNA) is used as this endogenous control. To calculate relative quantitation between all the samples studied, the target RNA levels for one sample were used as the basis for comparative results (calibrator). Quantitation relative to the “calibrator” can be obtained using the comparative method (User Bulletin #2: ABI PRISM 7700 Sequence Detection System).

[0483] The tissue distribution and the level of the target gene are evaluated for every sample in normal and cancer tissues. Total RNA is extracted from normal tissues, cancer tissues, and from cancers and the corresponding matched adjacent tissues. Subsequently, first strand cDNA is prepared with reverse transcriptase and the polymerase chain reaction is done using primers and Taqman® probes specific to each target gene. The results are analyzed using the ABI PRISM 7700 Sequence Detector. The absolute numbers are relative levels of expression of the target gene in a particular tissue compared to the calibrator tissue.

[0484] One of ordinary skill can design appropriate primers. The relative levels of expression of the CSNA versus normal tissues and other cancer tissues can then be determined. All the values are compared to the calibrator. Normal RNA samples are commercially available pools, originated by pooling samples of a particular tissue from different individuals.

[0485] The relative levels of expression of the CSNA in pairs of matched samples may also be determined. A matched pair is formed by mRNA from the cancer sample for a particular tissue and mRNA from the normal adjacent sample for that same tissue from the same individual. All the values are compared to the calibrator.

[0486] In the analysis of matching samples, the CSNAs show a high degree of tissue specificity for the tissue of interest. These results confirm the tissue specificity results obtained with normal pooled samples. Further, the level of mRNA expression in cancer samples and the isogenic normal adjacent tissue from the same individual are compared. This comparison provides an indication of specificity for the cancer state (e.g. higher levels of mRNA expression in the cancer sample compared to the normal adjacent).

[0487] Informaton on the samples tested in the QPCR experiments include the Sample ID (Smpl ID), Organ, Tissue Type (Tiss Type), Diagnosis (DIAG), Disease Detail, and Stage or Grade (STG or GRD).

[0488] Altogether, the high level of tissue specificity, plus the mRNA overexpression in matched samples tested are indicative of SEQ ID NO: 1-112 being a diagnostic marker and/or a therapeutic target for cancer.

### Example 3

### Protein Expression

[0489] The CSNA is amplified by polymerase chain reaction (PCR) and the amplified DNA fragment encoding the CSNA is subcloned in pET-21d for expression in E. coli. In addition to the CSNA coding sequence, codons for two amino acids, Met-Ala, flanking the NH₂-terminus of the coding sequence of CSNA, and six histidines, flanking the COOH-terminus of the coding sequence of CSNA, are incorporated to serve as initiating Met/restriction site and purification tag, respectively.

[0490] An over-expressed protein band of the appropriate molecular weight may be observed on a Coomassie blue stained polyacrylamide gel. This protein band is confirmed by Western blot analysis using monoclonal antibody against 6× Histidine tag.

[0491] Large-scale purification of CSP is achieved using cell paste generated from 6-liter bacterial cultures, and purified using immobilized metal affinity chromatography (IMAC). Soluble fractions that are separated from total cell lysate were incubated with a nickel chelating resin. The column is packed and washed with five column volumes of wash buffer. CSP is eluted stepwise with various concentration imidazole buffers.

### Example 4

### Fusion Proteins

[0492] The human Fc portion of the IgG molecule can be PCR amplified, using primers that span the 5′ and 3′ ends of the sequence described below. These primers also should have convenient restriction enzyme sites that will facilitate cloning into an expression vector, preferably a mammalian expression vector. For example, if pC4 (Accession No. 209646) is used, the human Fc portion can be ligated into the BamHI cloning site. Note that the 3′ BamHI site should be destroyed. Next, the vector containing the human Fc portion is re-restricted with BamHI, linearizing the vector, and a polynucleotide of the present invention, isolated by the PCR protocol described in Example 2, is ligated into this BamHI site. Note that the polynucleotide is cloned without a stop codon, otherwise a fusion protein will not be produced. If the naturally occurring signal sequence is used to produce the secreted protein, pC4 does not need a second signal peptide. Alternatively, if the naturally occurring signal sequence is not used, the vector can be modified to include a heterologous signal sequence. See, e.g., WO 96/34891.

### Example 5

### Production of an Antibody from a Polypeptide

[0493] In general, such procedures involve immunizing an animal (preferably a mouse) with polypeptide or, more preferably, with a secreted polypeptide-expressing cell. Such cells may be cultured in any suitable tissue culture medium; however, it is preferable to culture cells in Earle's modified Eagle's medium supplemented with 10% fetal bovine serum (inactivated at about 56° C.), and supplemented with about 10 g/l of nonessential amino acids, about 1,000 U/ml of penicillin, and about 100, μg/ml of streptomycin. The splenocytes of such mice are extracted and fused with a suitable myeloma cell line. Any suitable myeloma cell line may be employed in accordance with the present invention; however, it is preferable to employ the parent myeloma cell line (SP20), available from the ATCC. After fusion, the resulting hybridoma cells are selectively maintained in HAT medium, and then cloned by limiting dilution as described by Wands et al., Gastroenterology 80: 225-232 (1981).

[0494] The hybridoma cells obtained through such a selection are then assayed to identify clones which secrete antibodies capable of binding the polypeptide. Alternatively, additional antibodies capable of binding to the polypeptide can be produced in a two-step procedure using anti-idiotypic antibodies. Such a method makes use of the fact that antibodies are themselves antigens, and therefore, it is possible to obtain an antibody which binds to a second antibody. In accordance with this method, protein specific antibodies are used to immunize an animal, preferably a mouse. The splenocytes of such an animal are then used to produce hybridoma cells, and the hybridoma cells are screened to identify clones which produce an antibody whose ability to bind to the protein-specific antibody can be blocked by the polypeptide. Such antibodies comprise anti-idiotypic antibodies to the protein specific antibody and can be used to immunize an animal to induce formation of further protein-specific antibodies.

### Example 6

### Method of Determining Alterations in a Gene Corresponding to a Polynucleotide

[0495] RNA is isolated from individual patients or from a family of individuals that have a phenotype of interest. cDNA is then generated from these RNA samples using protocols known in the art. See, Sambrook (2001), supra. The cDNA is then used as a template for PCR, employing primers surrounding regions of interest in SEQ ID NO: 1-112. Suggested PCR conditions consist of 35 cycles at 95° C. for 30 seconds; 60-120 seconds at 52-58° C.; and 60-120 seconds at 70° C., using buffer solutions described in Sidransky et al., Science 252(5006): 706-9 (1991). See also Sidransky et al., Science 278(5340): 1054-9 (1997).

[0496] PCR products are then sequenced using primers labeled at their 5′ end with T4 polynucleotide kinase, employing SequiTherm Polymerase. (Epicentre Technologies). The intron-exon borders of selected exons are also determined and genomic PCR products analyzed to confirm the results. PCR products harboring suspected mutations are then cloned and sequenced to validate the results of the direct sequencing. PCR products is cloned into T-tailed vectors as described in Holton et al., Nucleic Acids Res., 19: 1156 (1991) and sequenced with T7 polymerase (United States Biochemical). Affected individuals are identified by mutations not present in unaffected individuals.

[0497] Genomic rearrangements may also be determined. Genomic clones are nick-translated with digoxigenin deoxyuridine 5′ triphosphate (Boehringer Manheim), and FISH is performed as described in Johnson et al., Methods Cell Biol. 35: 73-99 (1991). Hybridization with the labeled probe is carried out using a vast excess of human cot-1 DNA for specific hybridization to the corresponding genomic locus.

[0498] Chromosomes are counterstained with 4,6-diamino-2-phenylidole and propidium iodide, producing a combination of C- and R-bands. Aligned images for precise mapping are obtained using a triple-band filter set (Chroma Technology, Brattleboro, Vt.) in combination with a cooled charge-coupled device camera (Photometrics, Tucson, Ariz.) and variable excitation wavelength filters. Johnson (1991). Image collection, analysis and chromosomal fractional length measurements are performed using the ISee Graphical Program System. (Inovision Corporation, Durham. NC.) Chromosome alterations of the genomic region hybridized by the probe are identified as insertions, deletions, and translocations. These alterations are used as a diagnostic marker for an associated disease.

### Example 7

### Method of Detecting Abnormal Levels of a Polypeptide in a Biological Sample

[0499] Antibody-sandwich ELISAs are used to detect polypeptides in a sample, preferably a biological sample. Wells of a microtiter plate are coated with specific antibodies, at a final concentration of 0.2 to 10 ug/ml. The antibodies are either monoclonal or polyclonal and are produced by the method described above. The wells are blocked so that non-specific binding of the polypeptide to the well is reduced. The coated wells are then incubated for >2 hours at RT with a sample containing the polypeptide. Preferably, serial dilutions of the sample should be used to validate results. The plates are then washed three times with deionized or distilled water to remove unbound polypeptide. Next, 50 μl of specific antibody-alkaline phosphatase conjugate, at a concentration of 25-400 ng, is added and incubated for 2 hours at room temperature. The plates are again washed three times with deionized or distilled water to remove unbound conjugate. 75 μl of 4-methylumbelliferyl phosphate (MUP) or p-nitrophenyl phosphate (NPP) substrate solution are added to each well and incubated 1 hour at room temperature.

[0500] The reaction is measured by a microtiter plate reader. A standard curve is prepared, using serial dilutions of a control sample, and polypeptide concentrations are plotted on the X-axis (log scale) and fluorescence or absorbance on the Y-axis (linear scale). The concentration of the polypeptide in the sample is calculated using the standard curve.

### Example 8

### Formulating a Polypeptide

[0501] The secreted polypeptide composition will be formulated and dosed in a fashion consistent with good medical practice, taking into account the clinical condition of the individual patient (especially the side effects of treatment with the secreted polypeptide alone), the site of delivery, the method of administration, the scheduling of administration, and other factors known to practitioners. The “effective amount” for purposes herein is thus determined by such considerations.

[0502] As a general proposition, the total pharmaceutically effective amount of secreted polypeptide administered parenterally per dose will be in the range of about 1, μg/kg/day to 10 mg/kg/day of patient body weight, although, as noted above, this will be subject to therapeutic discretion. More preferably, this dose is at least 0.01 mg/kg/day, and most preferably for humans between about 0.01 and 1 mg/kg/day for the hormone. If given continuously, the secreted polypeptide is typically administered at a dose rate of about 1 μg/kg/hour to about 50 mg/kg/hour, either by 1-4 injections per day or by continuous subcutaneous infusions, for example, using a mini-pump. An intravenous bag solution may also be employed. The length of treatment needed to observe changes and the interval following treatment for responses to occur appears to vary depending on the desired effect.

[0503] Pharmaceutical compositions containing the secreted protein of the invention are administered orally, rectally, parenterally, intracistemally, intravaginally, intraperitoneally, topically (as by powders, ointments, gels, drops or transdermal patch), bucally, or as an oral or nasal spray. “Pharmaceutically acceptable carrier” refers to a non-toxic solid, semisolid or liquid filler, diluent, encapsulating material or formulation auxiliary of any type. The term “parenteral” as used herein refers to modes of administration which include intravenous, intramuscular, intraperitoneal, intrasternal, subcutaneous and intraarticular injection and infusion.

[0504] The secreted polypeptide is also suitably administered by sustained-release systems. Suitable examples of sustained-release compositions include semipermeable polymer matrices in the form of shaped articles, e.g., films, or microcapsules. Sustained-release matrices include polylactides (U.S. Pat. No. 3,773,919, EP 58,481, the contents of which are hereby incorporated by reference herein in their entirety), copolymers of L-glutamic acid and gamma-ethyl-L-glutamate (Sidman, U. et al., Biopolymers 22: 547-556 (1983)), poly(2-hydroxyethyl methacrylate) (R. Langer et al., J. Biomed. Mater. Res. 15: 167-277 (1981), and R. Langer, Chem. Tech. 12: 98-105 (1982)), ethylene vinyl acetate (R. Langer et al.) or poly-D-(−)-3-hydroxybutyric acid (EP 133,988). Sustained-release compositions also include liposomally entrapped polypeptides. Liposomes containing the secreted polypeptide are prepared by methods known per se: DE Epstein et al., Proc. Natl. Acad. Sci. USA 82: 3688-3692 (1985); Hwaug et al., Proc. Natl. Acad. Sci. USA 77: 4030-4034 (1980); EP 52,322; EP 36,676; EP 88,046; EP 143,949; EP 142,641; Japanese Pat. Appl. 83-118008; U.S. Pat. Nos. 4,485,045 and 4,544,545; and EP 102,324, the contents of which are hereby incorporated by reference herein in their entirety. Ordinarily, the liposomes are of the small (about 200-800 Angstroms) unilamellar type in which the lipid content is greater than about 30 mol. percent cholesterol, the selected proportion being adjusted for the optimal secreted polypeptide therapy.

[0505] For parenteral administration, in one embodiment, the secreted polypeptide is formulated generally by mixing it at the desired degree of purity, in a unit dosage injectable form (solution, suspension, or emulsion), with a pharmaceutically acceptable carrier, i.e., one that is non-toxic to recipients at the dosages and concentrations employed and is compatible with other ingredients of the formulation.

[0506] For example, the formulation preferably does not include oxidizing agents and other compounds that are known to be deleterious to polypeptides. Generally, the formulations are prepared by contacting the polypeptide uniformly and intimately with liquid carriers or finely divided solid carriers or both. Then, if necessary, the product is shaped into the desired formulation. Preferably, the carrier is a parenteral carrier, more preferably, a solution that is isotonic with the blood of the recipient. Examples of such carrier vehicles include water, saline, Ringer's solution, and dextrose solution. Non-aqueous vehicles such as fixed oils and ethyl oleate are also useful herein, as well as liposomes.

[0507] The carrier suitably contains minor amounts of additives such as substances that enhance isotonicity and chemical stability. Such materials are non-toxic to recipients at the dosages and concentrations employed, and include buffers such as phosphate, citrate, succinate, acetic acid, and other organic acids or their salts; antioxidants such as ascorbic acid; low molecular weight (less than about ten residues) polypeptides, e.g., polyarginine or tripeptides; proteins, such as serum albumin, gelatin, or immunoglobulins; hydrophilic polymers such as polyvinylpyrrolidone; amino acids, such as glycine, glutamic acid, aspartic acid, or arginine; monosaccharides, disaccharides, and other carbohydrates including cellulose or its derivatives, glucose, manose, or dextrins; chelating agents such as EDTA; sugar alcohols such as mannitol or sorbitol; counterions such as sodium; and/or nonionic surfactants such as polysorbates, poloxamers, or PEG.

[0508] The secreted polypeptide is typically formulated in such vehicles at a concentration of about 0.1 mg/ml to 100 mg/ml, preferably 1-10 mg/ml, at a pH of about 3 to 8. It will be understood that the use of certain of the foregoing excipients, carriers, or stabilizers will result in the formation of polypeptide salts.

[0509] Any polypeptide to be used for therapeutic administration can be sterile. Sterility is readily accomplished by filtration through sterile filtration membranes (e.g., 0.2 micron membranes). Therapeutic polypeptide compositions generally are placed into a container having a sterile access port, for example, an intravenous solution bag or vial having a stopper pierceable by a hypodermic injection needle.

[0510] Polypeptides ordinarily will be stored in unit or multi-dose containers, for example, sealed ampules or vials, as an aqueous solution or as a lyophilized formulation for reconstitution. As an example of a lyophilized formulation, 10-ml vials are filled with 5 ml of sterile-filtered 1% (w/v) aqueous polypeptide solution, and the resulting mixture is lyophilized. The infusion solution is prepared by reconstituting the lyophilized polypeptide using bacteriostatic Water-for-Injection.

[0511] The invention also provides a pharmaceutical pack or kit comprising one or more containers filled with one or more of the ingredients of the pharmaceutical compositions of the invention. Associated with such container (s) can be a notice in the form prescribed by a governmental agency regulating the manufacture, use or sale of pharmaceuticals or biological products, which notice reflects approval by the agency of manufacture, use or sale for human administration. In addition, the polypeptides of the present invention may be employed in conjunction with other therapeutic compounds.

### Example 9

### Method of Treating Decreased Levels of the Polypeptide

[0512] It will be appreciated that conditions caused by a decrease in the standard or normal expression level of a secreted protein in an individual can be treated by administering the polypeptide of the present invention, preferably in the secreted form. Thus, the invention also provides a method of treatment of an individual in need of an increased level of the polypeptide comprising administering to such an individual a pharmaceutical composition comprising an amount of the polypeptide to increase the activity level of the polypeptide in such an individual.

[0513] For example, a patient with decreased levels of a polypeptide receives a daily dose 0.1-100 ug/kg of the polypeptide for six consecutive days. Preferably, the polypeptide is in the secreted form. The exact details of the dosing scheme, based on administration and formulation, are provided above.

### Example 10

### Method of Treating Increased Levels of the Polypeptide

[0514] Antisense or RNAi technology are used to inhibit production of a polypeptide of the present invention. This technology is one example of a method of decreasing levels of a polypeptide, preferably a secreted form, due to a variety of etiologies, such as cancer.

[0515] For example, a patient diagnosed with abnormally increased levels of a polypeptide is administered intravenously antisense polynucleotides at 0.5, 1.0, 1.5, 2.0 and 3.0 mg/kg day for 21 days. This treatment is repeated after a 7-day rest period if the treatment was well tolerated. The formulation of the antisense polynucleotide is provided above.

### Example 11

### Method of Treatment Using Gene Therapy

[0516] One method of gene therapy transplants fibroblasts, which are capable of expressing a polypeptide, onto a patient. Generally, fibroblasts are obtained from a subject by skin biopsy. The resulting tissue is placed in tissue-culture medium and separated into small pieces. Small chunks of the tissue are placed on a wet surface of a tissue culture flask, approximately ten pieces are placed in each flask. The flask is turned upside down, closed tight and left at room temperature over night. After 24 hours at room temperature, the flask is inverted and the chunks of tissue remain fixed to the bottom of the flask and fresh media (e.g., Ham's F12 media, with 10% FBS, penicillin and streptomycin) is added. The flasks are then incubated at 37° C. for approximately one week.

[0517] At this time, fresh media is added and subsequently changed every several days. After an additional two weeks in culture, a monolayer of fibroblasts emerge. The monolayer is trypsinized and scaled into larger flasks. pMV-7 (Kirschmeier, P. T. et al., DNA, 7: 219-25 (1988)), flanked by the long terminal repeats of the Moloney murine sarcoma virus, is digested with EcoRI and HindIII and subsequently treated with calf intestinal phosphatase. The linear vector is fractionated on agarose gel and purified, using glass beads.

[0518] The cDNA encoding a polypeptide of the present invention can be amplified using PCR primers which correspond to the 5′and 3′end sequences respectively as set forth in Example 3. Preferably, the 5′primer contains an EcoRI site and the 3′primer includes a HindIII site. Equal quantities of the Moloney murine sarcoma virus linear backbone and the amplified EcoRI and HindIII fragment are added together, in the presence of T4 DNA ligase. The resulting mixture is maintained under conditions appropriate for ligation of the two fragments. The ligation mixture is then used to transform bacteria HB 101, which are then plated onto agar containing kanamycin for the purpose of confirming that the vector has the gene of interest properly inserted.

[0519] The amphotropic pA317 or GP+am12 packaging cells are grown in tissue culture to confluent density in Dulbecco's Modified Eagles Medium (DMEM) with 10% calf serum (CS), penicillin and streptomycin. The MSV vector containing the gene is then added to the media and the packaging cells transduced with the vector. The packaging cells now produce infectious viral particles containing the gene (the packaging cells are now referred to as producer cells).

[0520] Fresh media is added to the transduced producer cells, and subsequently, the media is harvested from a 10 cm plate of confluent producer cells. The spent media, containing the infectious viral particles, is filtered through a millipore filter to remove detached producer cells and this media is then used to infect fibroblast cells. Media is removed from a sub-confluent plate of fibroblasts and quickly replaced with the media from the producer cells. This media is removed and replaced with fresh media.

[0521] If the titer of virus is high, then virtually all fibroblasts will be infected and no selection is required. If the titer is very low, then it is necessary to use a retroviral vector that has a selectable marker, such as neo or his. Once the fibroblasts have been efficiently infected, the fibroblasts are analyzed to determine whether protein is produced.

[0522] The engineered fibroblasts are then transplanted onto the host, either alone or after having been grown to confluence on cytodex 3 microcarrier beads.

### Example 12

### Method of Treatment Using Gene Therapy-In Vivo

[0523] Another aspect of the present invention is using in vivo gene therapy methods to treat disorders, diseases and conditions. The gene therapy method relates to the introduction of naked nucleic acid (DNA, RNA, and antisense DNA or RNA) sequences into an animal to increase or decrease the expression of the polypeptide.

[0524] The polynucleotide of the present invention may be operatively linked to a promoter or any other genetic elements necessary for the expression of the polypeptide by the target tissue. Such gene therapy and delivery techniques and methods are known in the art, see, for example, Tabata H. et al. Cardiovasc. Res. 35 (3): 470-479 (1997); Chao J et al. Pharmacol. Res. 35 (6): 517-522 (1997); Wolff J. A. Neuromuscul. Disord. 7 (5): 314-318 (1997), Schwartz B. et al. Gene Ther. 3 (5): 405-411 (1996); and Tsurumi Y. et al. Circulation 94 (12): 3281-3290 (1996); WO 90/11092, WO 98/11779; U.S. Pat. Nos. 5,693,622; 5,705,151; 5,580,859, the contents of which are hereby incorporated by reference herein in their entirety.

[0525] The polynucleotide constructs may be delivered by any method that delivers injectable materials to the cells of an animal, such as, injection into the interstitial space of tissues (heart, muscle, skin, colon, liver, intestine and the like). The polynucleotide constructs can be delivered in a pharmaceutically acceptable liquid or aqueous carrier.

[0526] The term “naked” polynucleotide, DNA or RNA, refers to sequences that are free from any delivery vehicle that acts to assist, promote, or facilitate entry into the cell, including viral sequences, viral particles, liposome formulations, lipofectin or precipitating agents and the like. However, the polynucleotides of the present invention may also be delivered in liposome formulations (such as those taught in Felgner P. L. et al. Ann. NY Acad. Sci. 772: 126-139 (1995) and Abdallah B. et al. Biol. Cell 85 (1): 1-7 (1995)) which can be prepared by methods well known to those skilled in the art.

[0527] The polynucleotide vector constructs used in the gene therapy method are preferably constructs that will not integrate into the host genome nor will they contain sequences that allow for replication. Any strong promoter known to those skilled in the art can be used for driving the expression of DNA. Unlike other gene therapies techniques, one major advantage of introducing naked nucleic acid sequences into target cells is the transitory nature of the polynucleotide synthesis in the cells. Studies have shown that non-replicating DNA sequences can be introduced into cells to provide production of the desired polypeptide for periods of up to six months.

[0528] The polynucleotide construct can be delivered to the interstitial space of tissues within the an animal, including of muscle, skin, brain, colon, liver, spleen, bone marrow, thymus, heart, lymph, blood, bone, cartilage, pancreas, kidney, gall bladder, stomach, intestine, testis, ovary, uterus, rectum, nervous system, eye, gland, and connective tissue. Interstitial space of the tissues comprises the intercellular fluid, mucopolysaccharide matrix among the reticular fibers of organ tissues, elastic fibers in the walls of vessels or chambers, collagen fibers of fibrous tissues, or that same matrix within connective tissue ensheathing muscle cells or in the lacunae of bone. It is similarly the space occupied by the plasma of the circulation and the lymph fluid of the lymphatic channels. Delivery to the interstitial space of muscle tissue is preferred for the reasons discussed below. They may be conveniently delivered by injection into the tissues comprising these cells. They are preferably delivered to and expressed in persistent, non-dividing cells which are differentiated, although delivery and expression may be achieved in non-differentiated or less completely differentiated cells, such as, for example, stem cells of blood or skin fibroblasts. In vivo muscle cells are particularly competent in their ability to take up and express polynucleotides.

[0529] For the naked polynucleotide injection, an effective dosage amount of DNA or RNA will be in the range of from about 0.05 μg/kg body weight to about 50 mg/g body weight. Preferably the dosage will be from about 0.005 mg/kg to about 20 mg/kg and more preferably from about 0.05 mg/kg to about 5 mg/kg. Of course, as the artisan of ordinary skill will appreciate, this dosage will vary according to the tissue site of injection. The appropriate and effective dosage of nucleic acid sequence can readily be determined by those of ordinary skill in the art and may depend on the condition being treated and the route of administration. The preferred route of administration is by the parenteral route of injection into the interstitial space of tissues. However, other parenteral routes may also be used, such as, inhalation of an aerosol formulation particularly for delivery to colons or bronchial tissues, throat or mucous membranes of the nose. In addition, naked polynucleotide constructs can be delivered to arteries during angioplasty by the catheter used in the procedure.

[0530] The dose response effects of injected polynucleotide in muscle in vivo is determined as follows. Suitable template DNA for production of mRNA coding for polypeptide of the present invention is prepared in accordance with a standard recombinant DNA methodology. The template DNA, which may be either circular or linear, is either used as naked DNA or complexed with liposomes. The quadriceps muscles of mice are then injected with various amounts of the template DNA.

[0531] Five to six week old female and male Balb/C mice are anesthetized by intraperitoneal injection with 0.3 ml of 2.5% Avertin. A 1.5 cm incision is made on the anterior thigh, and the quadriceps muscle is directly visualized. The template DNA is injected in 0.1 ml of carrier in a 1 cc syringe through a 27 gauge needle over one minute, approximately 0.5 cm from the distal insertion site of the muscle into the knee and about 0.2 cm deep. A suture is placed over the injection site for future localization, and the skin is closed with stainless steel clips.

[0532] After an appropriate incubation time (e.g., 7 days) muscle extracts are prepared by excising the entire quadriceps. Every fifth 15 um cross-section of the individual quadriceps muscles is histochemically stained for protein expression. A time course for protein expression may be done in a similar fashion except that quadriceps from different mice are harvested at different times. Persistence of DNA in muscle following injection may be determined by Southern blot analysis after preparing total cellular DNA and HIRT supernatants from injected and control mice.

[0533] The results of the above experimentation in mice can be use to extrapolate proper dosages and other treatment parameters in humans and other animals using naked DNA.

### Example 13

### Transgenic Animals

[0534] The polypeptides of the invention can also be expressed in transgenic animals. Animals of any species, including, but not limited to, mice, rats, rabbits, hamsters, guinea pigs, pigs, micro-pigs, goats, sheep, cows and non-human primates, e.g., baboons, monkeys, and chimpanzees may be used to generate transgenic animals. In a specific embodiment, techniques described herein or otherwise known in the art, are used to express polypeptides of the invention in humans, as part of a gene therapy protocol.

[0535] Any technique known in the art may be used to introduce the transgene (I. e., polynucleotides of the invention) into animals to produce the founder lines of transgenic animals. Such techniques include, but are not limited to, pronuclear microinjection (Paterson et al., Appl. Microbiol. Biotechnol. 40: 691-698 (1994); Carver et al., Biotechnology, 11: 1263-1270 (1993); Wright et al., Biotechnology 9: 830-834 (1991); and U.S. Pat. No. 4,873,191, the contents of which is hereby incorporated by reference herein in its entirety); retrovirus mediated gene transfer into germ lines (fan der Putten et al., Proc. Natl. Acad. Sci., USA 82: 6148-6152 (1985)), blastocysts or embryos; gene targeting in embryonic stem cells (Thompson et al., Cell 56: 313-321 (1989)); electroporation of cells or embryos (Lo, 1983, Mol Cell. Biol. 3: 1803-1814 (1983)); introduction of the polynucleotides of the invention using a gene gun (see, e.g., Ulmer et al., Science 259: 1745 (1993); introducing nucleic acid constructs into embryonic pleuripotent stem cells and transferring the stem cells back into the blastocyst; and sperm mediated gene transfer (Lavitrano et al., Cell 57: 717-723 (1989). For a review of such techniques, see Gordon, “Transgenic Animals,” Intl. Rev. Cytol. 115: 171-229(1989).

[0536] Any technique known in the art may be used to produce transgenic clones containing polynucleotides of the invention, for example, nuclear transfer into enucleated oocytes of nuclei from cultured embryonic, fetal, or adult cells induced to quiescence (Campell et al., Nature 380: 64-66 (1996); Wilmut et al., Nature 385: 810813 (1997)).

[0537] The present invention provides for transgenic animals that carry the transgene in all their cells, as well as animals which carry the transgene in some, but not all their cells, I. e., mosaic animals or chimeric. The transgene may be integrated as a single transgene or as multiple copies such as in concatamers, e.g., head-to-head tandems or head-to-tail tandems. The transgene may also be selectively introduced into and activated in a particular cell type by following, for example, the teaching of Lasko et al. (Lasko et al., Proc. Natl. Acad. Sci. USA 89: 6232-6236 (1992)). The regulatory sequences required for such a cell-type specific activation will depend upon the particular cell type of interest, and will be apparent to those of skill in the art. When it is desired that the polynucleotide transgene be integrated into the chromosomal site of the endogenous gene, gene targeting is preferred. Briefly, when such a technique is to be utilized, vectors containing some nucleotide sequences homologous to the endogenous gene are designed for the purpose of integrating, via homologous recombination with chromosomal sequences, into and disrupting the function of the nucleotide sequence of the endogenous gene. The transgene may also be selectively introduced into a particular cell type, thus inactivating the endogenous gene in only that cell type, by following, for example, the teaching of Gu et al. (Gu et al., Science 265: 103-106 (1994)). The regulatory sequences required for such a cell-type specific inactivation will depend upon the particular cell type of interest, and will be apparent to those of skill in the art.

[0538] Once transgenic animals have been generated, the expression of the recombinant gene may be assayed utilizing standard techniques. Initial screening may be accomplished by Southern blot analysis or PCR techniques to analyze animal tissues to verify that integration of the transgene has taken place. The level of mRNA expression of the transgene in the tissues of the transgenic animals may also be assessed using techniques which include, but are not limited to, Northern blot analysis of tissue samples obtained from the animal, in situ hybridization analysis, and reverse transcriptase-PCR (rt-PCR). Samples of transgenic gene-expressing tissue may also be evaluated immunocytochemically or immunohistochemically using antibodies specific for the transgene product.

[0539] Once the founder animals are produced, they may be bred, inbred, outbred, or crossbred to produce colonies of the particular animal. Examples of such breeding strategies include, but are not limited to: outbreeding of founder animals with more than one integration site in order to establish separate lines; inbreeding of separate lines in order to produce compound transgenics that express the transgene at higher levels because of the effects of additive expression of each transgene; crossing of heterozygous transgenic animals to produce animals homozygous for a given integration site in order to both augment expression and eliminate the need for screening of animals by DNA analysis; crossing of separate homozygous lines to produce compound heterozygous or homozygous lines; and breeding to place the transgene on a distinct background that is appropriate for an experimental model of interest.

[0540] Transgenic animals of the invention have uses which include, but are not limited to, animal model systems useful in elaborating the biological function of polypeptides of the present invention, studying conditions and/or disorders associated with aberrant expression, and in screening for compounds effective in ameliorating such conditions and/or disorders.

### Example 14

### Knock-Out Animals

[0541] Endogenous gene expression can also be reduced by inactivating or “knocking out” the gene and/or its promoter using targeted homologous recombination. (E. g., see Smithies et al., Nature 317: 230-234 (1985); Thomas & Capecchi, Cell 51: 503512 (1987); Thompson et al., Cell 5: 313-321 (1989)) Alternatively, RNAi technology may be used. For example, a mutant, non-functional polynucleotide of the invention (or a completely unrelated DNA sequence) flanked by DNA homologous to the endogenous polynucleotide sequence (either the coding regions or regulatory regions of the gene) can be used, with or without a selectable marker and/or a negative selectable marker, to transfect cells that express polypeptides of the invention in vivo. In another embodiment, techniques known in the art are used to generate knockouts in cells that contain, but do not express the gene of interest. Insertion of the DNA construct, via targeted homologous recombination, results in inactivation of the targeted gene. Such approaches are particularly suited in research and agricultural fields where modifications to embryonic stem cells can be used to generate animal offspring with an inactive targeted gene (e.g., see Thomas & Capecchi 1987 and Thompson 1989, supra). However, this approach can be routinely adapted for use in humans provided the recombinant DNA constructs are directly administered or targeted to the required site in vivo using appropriate viral vectors that will be apparent to those of skill in the art.

[0542] In further embodiments of the invention, cells that are genetically engineered to express the polypeptides of the invention, or alternatively, that are genetically engineered not to express the polypeptides of the invention (e.g., knockouts) are administered to a patient in vivo. Such cells may be obtained from the patient (i.e., animal, including human) or an MHC compatible donor and can include, but are not limited to fibroblasts, bone marrow cells, blood cells (e.g., lymphocytes), adipocytes, muscle cells, endothelial cells etc. The cells are genetically engineered in vitro using recombinant DNA techniques to introduce the coding sequence of polypeptides of the invention into the cells, or alternatively, to disrupt the coding sequence and/or endogenous regulatory sequence associated with the polypeptides of the invention, e.g., by transduction (using viral vectors, and preferably vectors that integrate the transgene into the cell genome) or transfection procedures, including, but not limited to, the use of plasmids, cosmids, YACS, naked DNA, electroporation, liposomes, etc.

[0543] The coding sequence of the polypeptides of the invention can be placed under the control of a strong constitutive or inducible promoter or promoter/enhancer to achieve expression, and preferably secretion, of the polypeptides of the invention. The engineered cells which express and preferably secrete the polypeptides of the invention can be introduced into the patient systemically, e.g., in the circulation, or intraperitoneally.

[0544] Alternatively, the cells can be incorporated into a matrix and implanted in the body, e.g., genetically engineered fibroblasts can be implanted as part of a skin graft; genetically engineered endothelial cells can be implanted as part of a lymphatic or vascular graft (See, for example, Anderson et al. U.S. Pat. No. 5,399,349; and Mulligan & Wilson, U.S. Pat. No. 5,460,959, the contents of which are hereby incorporated by reference herein in their entirety).

[0545] When the cells to be administered are non-autologous or non-MHC compatible cells, they can be administered using well known techniques which prevent the development of a host immune response against the introduced cells. For example, the cells may be introduced in an encapsulated form which, while allowing for an exchange of components with the immediate extracellular environment, does not allow the introduced cells to be recognized by the host immune system.

[0546] Transgenic and “knock-out” animals of the invention have uses which include, but are not limited to, animal model systems useful in elaborating the biological function of polypeptides of the present invention, studying conditions and/or disorders associated with aberrant expression, and in screening for compounds effective in ameliorating such conditions and/or disorders.

[0547] While preferred illustrative embodiments of the present invention are described, one skilled in the art will appreciate that the present invention can be practiced by other than the described embodiments, which are presented for purposes of illustration only and not by way of limitation. The present invention is limited only by the claims that follow.

1. An isolated nucleic acid molecule comprising:
(a) a nucleic acid molecule comprising a nucleic acid sequence that encodes an amino acid sequence of SEQ ID NO: 113-259;
(b) a nucleic acid molecule comprising a nucleic acid sequence of SEQ ID NO: 1-112;
(c) a nucleic acid molecule that selectively hybridizes to the nucleic acid molecule of (a) or (b); or
(d) a nucleic acid molecule having at least 95% sequence identity to the nucleic acid molecule of (a) or (b).

2. The nucleic acid molecule according to claim 1, wherein the nucleic acid molecule is a cDNA.

3. The nucleic acid molecule according to claim 1, wherein the nucleic acid molecule is genomic DNA.

4. The nucleic acid molecule according to claim 1, wherein the nucleic acid molecule is an RNA.

5. The nucleic acid molecule according to claim 1, wherein the nucleic acid molecule is a mammalian nucleic acid molecule.

6. The nucleic acid molecule according to claim 5, wherein the nucleic acid molecule is a human nucleic acid molecule.

7. A method for determining the presence of a colon specific nucleic acid (CSNA) in a sample, comprising the steps of:
(a) contacting the sample with the nucleic acid molecule of claim 1 under conditions in which the nucleic acid molecule will selectively hybridize to a colon specific nucleic acid; and
(b) detecting hybridization of the nucleic acid molecule to a CSNA in the sample, wherein the detection of the hybridization indicates the presence of a CSNA in the sample.

8. A vector comprising the nucleic acid molecule of claim 1.

9. A host cell comprising the vector according to claim 8.

10. A method for producing a polypeptide encoded by the nucleic acid molecule according to claim 1, comprising the steps of:
(a) providing a host cell comprising the nucleic acid molecule operably linked to one or more expression control sequences, and
(b) incubating the host cell under conditions in which the polypeptide is produced.

11. A polypeptide encoded by the nucleic acid molecule according to claim 1.

12. An isolated polypeptide selected from the group consisting of:
(a) a polypeptide comprising an amino acid sequence with at least 95% sequence identity to of SEQ ID NO: 113-259; or
(b) a polypeptide comprising an amino acid sequence encoded by a nucleic acid molecule having at least 95% sequence identity to a nucleic acid molecule comprising a nucleic acid sequence of SEQ ID NO: 1-112.

13. An antibody or fragment thereof that specifically binds to a polypeptide of claim 12.

14. A method for determining the presence of a colon specific protein in a sample, comprising the steps of:
(a) contacting the sample with a suitable reagent under conditions in which the reagent will selectively interact with the colon specific protein comprising a polypeptide of claim 12; and
(b) detecting the interaction of the reagent with a colon specific protein in the sample, wherein the detection of binding indicates the presence of a colon specific protein in the sample.

15. A method for diagnosing or monitoring the presence and metastases of colon cancer in a patient, comprising the steps of:
(a) determining an amount of:
(i) a nucleic acid molecule comprising a nucleic acid sequence that encodes an amino acid sequence of SEQ ID NO: 113-259;
(ii) a nucleic acid molecule comprising a nucleic acid sequence of SEQ ID NO: 1-112;
(iii) a nucleic acid molecule that selectively hybridizes to the nucleic acid molecule of (i) or (ii);
(iv) a nucleic acid molecule having at least 95% sequence identity to the nucleic acid molecule of (i) or (ii);
(v) a polypeptide comprising an amino acid sequence with at least 95% sequence identity to of SEQ ID NO: 113-259; or
(vi) a polypeptide comprising an amino acid sequence encoded by a nucleic acid molecule having at least 95% sequence identity to a nucleic acid molecule comprising a nucleic acid sequence of SEQ ID NO: 1-112 and;
(b) comparing the amount of the determined nucleic acid molecule or the polypeptide in the sample of the patient to the amount of the colon specific marker in a normal control; wherein a difference in the amount of the nucleic acid molecule or the polypeptide in the sample compared to the amount of the nucleic acid molecule or the polypeptide in the normal control is associated with the presence of colon cancer.

16. A kit for detecting a risk of cancer or presence of cancer in a patient, said kit comprising a means for determining the presence of:
(a) a nucleic acid molecule comprising a nucleic acid sequence that encodes an amino acid sequence of SEQ ID NO: 113-259;
(b) a nucleic acid molecule comprising a nucleic acid sequence of SEQ ID NO: 1-112;
(c) a nucleic acid molecule that selectively hybridizes to the nucleic acid molecule of (a) or (b); or
(d) a nucleic acid molecule having at least 95% sequence identity to the nucleic acid molecule of (a) or (b); or
(e) a polypeptide of claim 12.

17. A method of treating a patient with colon cancer, comprising the step of administering a composition consisting of:
(a) a nucleic acid molecule comprising a nucleic acid sequence that encodes an amino acid sequence of SEQ ID NO: 113-259;
(b) a nucleic acid molecule comprising a nucleic acid sequence of SEQ ID NO: 1-112;
(c) a nucleic acid molecule that selectively hybridizes to the nucleic acid molecule of (a) or (b);
(d) a nucleic acid molecule having at least 95% sequence identity to the nucleic acid molecule of (a) or (b);
(e) a polypeptide of claim 12;
to a patient in need thereof, wherein said administration induces an immune response against the colon cancer cell expressing the nucleic acid molecule or polypeptide.

18. A vaccine comprising the polypeptide or the nucleic acid encoding the polypeptide of claim 12.

The application's sequence listing, which the Patent Office published only in electronic form, follows.

SEQUENCE LISTING (259 sequences)

SEQ ID NO: 1 - DNA, 1101 bp, Homo sapien
gggsgccggrrccgcgccgggccggctccagggcggccgcggcggtggggcgcaggccgccgcgcgagtgaatcgaggcggcgggcccatccggaaccggccggccatcgcccgcggcgcggccggcggaggcggcaggaaccgaccggcgccctacagcaggccaaaacaacttcccgacaagtggcagcacgatcttttcgacagtggcttcggcggtggtgccggcgtggagacaggtgggaaactgctggtgtccaatctggattttggagtctcagacgccgatattcaggaactctttgctgaatttggaacgctgaagaaggcggctgtgcactatgatcgctctggtcgcagcttaggaacagcagacgtgcactttgagcggaaggcagatgccctgaaggccatgaagcagtacaacggcgtccctctggatgcaagctacatccctcccctccttcagctccttccggaagattcacttctgtgaagccttctcagaaccgccatagtacacctctgagtgcggggctgtagtcgtaaagacaaaggccgccccatgaacattcagcttgtcacgtcacagattgacgcacagcggaggcctgcacagagcgtaaacagaggtggcatgactagaaaccgtggcgctggaggttttggtggtggtggaggcacccggagaggcacccgcggaggcgcccgtggaagaggcagaggtgccggcaggaattcaaagcagcagctttcggcagaggagctggatgcccagctggacgcctataatgcgagaatggacaccagttaaacagaccagcaaatccgcgtgcggaacaggacccaggcgtctcctcttgctccctggttggggggcggtggctggggctgtgcggccaatgatggatttgtttcttttatgttttaaaataggatttaaaaactcatgtaaaggttttttttttttctttttttttttttttaattctgaaacagacctgttttgtaccgagttatttttgggataaattttactggttgctgttgtggagaaggtggcgtttccaccttttccataataaaatagaaatgtgtgta

SEQ ID NO: 2 - DNA, 1022 bp, Homo sapien
cgaacgccttcgcgcgatcgccctggaaacgcattctctgcgaccggcagccgccaatgggaagggagtgagtgccacgaacaggccaataaggagggagcagtgcggggtttaaatctgaggctaggctggctcttctcggcgtgctgcggcggaacggctgttggtttctgctggttgtaggtccttggctggtcgggcctccggtgttctgcttctccccgctgagctgctgcctggtgaagaggaagccatggcgctccgagtcaccaggaactcgaaaattaatgctgaaaataaggcgaagatcaacatggcaggcgcaaagcgcgttcctacggcccctgctgcaacctccaagcccggactgaggccaagaacagctcttggggacattggtaacaaagtcagtgaacaactgcaggccaaaatgcctatgaagaaggaagcaaaaccttcagctactggaaaagtcattgataaaaaactaccaaaacctcttgaaaaggtacctatgctggtgccagtgccagtgtctgagccagtgccagagccagaacctgagccagaacctgagcctgttaaagaagaaaaactttcgcctgagcctattttggttgatactgcctctccaagcccaatggaaacatctggatgtgcccctgcagaagaagacctgtgtcaggctttctctgatgtaattcttgcagtaaatgatgtggatgcagaagatggagctgatccaaacctttgtagtgaatatgtgaaagatatttatgcttatctgagacaacttgaggaagagcaagcagtcagaccaaaatacctactgggtcgggaagtcactggaaacatgagagccatcctaattgactggtagtacaggttcaaatgaaatccgtgtgtgcgggacctgtctgcggtcctattgacgggccggcaaaattgggtgcccaaattgctggggggccggccgtttggcccttgaaaggccccagggggcgttgggggaccttagcaga

SEQ ID NO: 3 - DNA, 6046 bp, Homo sapien
acagtgtcatggaggccgcggcggtgacggtcacccggtcggctacacggcggcggcggcggcagctgcaggggctggcggccccggaggcggggacgcaggaggagcaggaggatcaggagccgcggccgcggcggcggcggccgggaaggagcatcaaagatgaagaagaagagacagtctttcgagaggtggtcagtttttccccggaccccctgccagttagatattatgacaaggacaccaccaaaccaatcagcttttacttgtcttcgctggaggagctcttggcgtggaagccccgcttggaggatggctttaatgtggccctggagcccctggcgtgtcgccagccccctctgagcagccagaggccccggactttgttgtgtcatgacatgatgggcgggtacctggatgacaggttcattcagggctcggtggtgcagactccctatgctttctaccactggcagtgcatcgacgtctttgtgtacttcagccaccacaccgtcaccattcccccagtgggctggaccaacactgcccacaggcatggggtctgcgtgctggggactttcatcacggagtggaatgaagggggaaggctctgtgaagccttcctggccggggatgagcgctcgtaccaggcagtggctgaccggctggtccagatcactcagttttttcgttttgatggctggctgatcaacatcgagaactcgctgagtctggccgctgtggggaacatgcctcctttcctgcggtacctcaccacacagctgcaccggcaggtcccagggggcctggtgctctggtatgacagcgtggtgcaaagtgggcagctcaaatggcaagacgaactcaaccagcacaacagggtcttctttgattcctgcgacggcttcttcactaactataactggcgggaggagcacttggagcggatgctggggcaggctggggagcgccgggctgatgtgtacgtgggcgtggatgtgtttgctcgagggaacgtggtcggaggccgattcgacacagacaaggtgggtggtggctttcgtccaagggccagcggcccagtgcctcccctgggacctcatttcctcatggaccttccattcccgtctgcacctcaaaggaatgacagcagctgttcttcccagagtggggatcccgtggcactgagaaacaggtgtcctgccccggccaagctatgtccccactgaaacccctttcccggctatttctacaatcagataatgtatttttgtgtgggtgttaccagacagaggcgcgtcgttcccccgctgtccggtcctcggcgggcctgggcctcctgtcccagctgcgttccttgatcttccccgtgagggaagcctgcggggacgcacaggggcctgcagcgcctctcactgcggctcaggggcgaggacgggggaggtgcccagggtttggggatcggtaggtgtcatgacgagggagcattttctggcaaggcaggtcacaccagcacagaggaaggagcggggccaggccggtgcccctggcgtgggatgcgcagggctctgcctgcctctggtctatcagtcctgcccgttcccagagccccagggatgttctcagcccttaatttagctttaaatgagtaaattaatccaataactaaagagcctctttactgcccgtgattctgataatcgaatgagaggtgtgccagaggacaatgggaccgcgcagccacagccagttggggcccagcccctgcccccctgcccttgcagcagcgctgaccgcctctcccgcgccctcttctggcgggcttgtggaacgacgggggtgatgcccagcagcctccaggtgcatctaggagggaggggttggacagcttccccctcccgtttctgagctgccctgagagccccaacccacgtcactggcgtccaggagcctgtctggactctggtcctgatgtgcccagcgtctccctctgtctcttcagtcgttggagctgatccgaaagcatggcttctccgtggctttgtttgcccccggctgggtgtatgagtgtctggagaagaaggatttcttccagaaccaggacaagttctggggccgactggagcgttatctgcccacacatagcatctgctccttgcctttcgtcacgtccttctgcctgggcatgggtgcacggagggtctgctatggccaggaagaggcggtagggccctggtaccacctgagcgcccaggagatccagcccttgtttggagaacacaggctgggaggggatggccggggctgggtgaggacgcactgctgcctggaggatgcctggcacggaggcagctccctgctcgtccggggtgtgatcccaccggaggttggaaatgtggctgtgaggtgggtgagtgacggaggacggtgggcccaccagcttctcccatcacacgtggtggccatggaactggacagatggggcagtggaggccagaacaaggacagaggacagacccagatgggttttttaaaattgtgatcaaaaatgcattaacgtgaaattcaccatcttgaccctgttgaagtgaacggtacaggagtgttaactctgcgtacgttgctacgtgacagatccctagaactgtgtcatcttgtaggactggactctccccattgcacattagccccccatcctcccccagccccccaaagccacccctttactctgcatctgtgagtttggatactttagatgccccatatgagggaatcccatacggtatttcagaactgagatgtttcagcccacaaaagaatctggccttgggggaggacttgtcccctggctacggacaggaccacgatgtgggagcatttggcacccaggccccctgttcctggagggaggggctggtggacgcgatttggagctggcttcgatttctcagtggtctctccacggcacccatcacaggacctttttccccaggttatttttattccctgcaggccccagtgccacccaagatttacctgtccatggtgtataagcttgaggggcccacggacgtcacagttgctttggagctgaccacaggggatgccggcagctgccacatcggtggcatctcagtgttgaacgcagaaacaagctcaagacacagcctccgacccctccgggtgccccccaccaagctggccagatgggtgggccgctgcggccggcagctgagtgggggctgggtccagcactgctacgaggtgagcctgcgtgggtgcctgctgctagacctcctcgtttgcttctcacggccgccgggtagtcgggaggaggagagcttcacctgtcggcttggagagatccaggtggtggacgctgccagcctgctggcccctctgccccaggtgcaggccgtcaccatctctcacatccgctggcagccatccgcctctgagcgggaggggccccctgctctgctccagctcagctgcaccctgcactggtccttcctcctctcacaagtccgttgcttccgaatccactgctggggagggatgagtgatgactctccgggcagggagctgccgaggccagagatgcccatgttcctggggttggcttttgccacccagtaccggatagtggacctgctggtggaagccgccgggcccggccaggatcgtcgcatggaatttctggtggagcctgtccccaaggaagggttccgggtacctcaggccgagtggggcagggcagttctgctttattcagcccctgcatgagcggatgctaaggccgggtggtctcctggcctcgggctgaggcctcttcccggctgtctgcccctggcctgcgctggacctgctaagtgcccacagtggcagcgaggtcccggtcccggggctggggtgggagaccccgggctgagtgctgtggctttctggtggggggcgatggaaacaggaaaccaagcagtgggatcgcagcgttggtcactgcgaggcgagtggcgggctttctgtttctgccttgtccctccccacggtacctggttcccaggtgaaaatgaaaggaggggagaagttgagaacagaacattccataaaggatatttcctaataggctgcaagatgctgatgccgagaatgatgattttctttcctgcagatgaaactattagaaagggtcttagattgtggcaggtaggctttggagcaggcgccgagacatttctgagcatgaggacgagctacagcagctcctggggtggggctgcctgcgggatggcgggagaggatgccctggagaaccgtcctcccagtgtggaaggcccttttccctgaggagtgggcattctgggccagccggcgctggcttcgtgcctccacgtgggccagccccagctgctccgtgtttcctggcgttggcaatttactgtgctgctgagtgtgaggtcatctccggagcgttttcagcagcccctggctctgcggcgtctcttccgggctgtgggcatgcagggaagtggctctgaggcagtctgcgctgtggccctgcctctgcccagcgagaggccgtgggctctggacaagccgcccttcaggctggggtagcaggtcagtccaggcaggaagcagcacctgccccccgcgccagcccagccccagcctgagtgcaggagctgcaggacccgcgggggcttttccagctactctgttccttcacgtcctcccttctcagcctcgtccaagcaccgggaagacctccaggctgaccccttgagcagcagtcagcacaggtgcgtgggggcgtgagggaggcagggtcttcaccacaggcgccttcctctgtccttcctgctctttcttctctgcccaggccgctgcagctgcacagcctctgctacacctgggctgcctgggaggcttcctggtgtggtgtctggaccccacggccttgggtcatcctgtggctggtctggggtggggtctgttgtggtccttccacggtgtcagtggcctgaagtccctcgcttttggggggggggtctctcacccccaggccacatagggccagtggtaggggttccctctatgtcgggcagtgctgagggctgggatgctctgtgaccccagctggagcccacacctaagggctggcatccacatcatttcaccctgcagtgagggaagaggccaccaggtggcagcacagccacacccgttcccacgtcagaggagggcaaggctgggtactcagcagccactctgagccggggctccttccaggagctgaaatccacctgtctccatcttccttgcctgcctgggtactcatgccaagcagagactgggattaggggttctgtgctcttgcctaattaggaacattctcccatgtctcttgtgtggtcccagaaggagaagtgagtttgccaaggatatggggcaggaggctccctctgctgaccccctgcagcctggagccagcccggggactgtcctgggtggagggcaggtgaacacaagctgctgccggggactgtcctgggtggacggcaggtgaacacaagcggctgccgcatgtagccactcactcgactttttttcagctgtgaccattcctgggagctctttgagcctttctgtctcatttggaaccagggggaaccaggaaggggctcctggcctctctgtgtcctctgcagtgggggttgtggggggcgcagcatccacgccttgctgcccttctttcatgaagtctgttttttaagtgctggttcccccgaatattttatgcagaggagggaaaatttatagtggcaattattttctcacagtctggtgagcaggcaattaattaggagtaagggggcctagtagagcgtggcgtgtggcagaatcgcaccgccccggctccccagcccaccgccatgcagggctcgcgtgcgggaaaactaatatgccggcgtttaagcctgtgcccctctgctgggtgtaactgcgctgaaataaatgatctgacaatgtgaaaaaaaaaaaa

SEQ ID NO: 4 - DNA, 5839 bp, Homo sapien
acagtgtcatggaggccgcggcggtgacggtcacccggtcggctacacggcggcggcggcggcagctgcaggggctggcggccccggaggcggggacgcaggaggagcaggaggatcaggagccgcggccgcggcggcggcggccgggaaggagcatcaaagatgaagaagaagagacagtctttcgagaggtggtcagtttttccccggaccccctgccagttagatattatgacaaggacaccaccaaaccaatcagcttttacttgtcttcgctggaggagctcttggcgtggaagccccgcttggaggatggctttaatgtggccctggagcccctggcgtgtcgccagccccctctgagcagccagaggccccggactttgttgtgtcatgacatgatgggcgggtacctggatgacaggttcattcagggctcggtggtgcagactccctatgctttctaccactggcagtgcatcgacgtctttgtgtacttcagccaccacaccgtcaccattcccccagtgggctggaccaacactgcccacaggcatggggtctgcgtgctggggactttcatcacggagtggaatgaagggggaaggctctgtgaagccttcctggccggggatgagcgctcgtaccaggcagtggctgaccggctggtccagatcactcagttttttcgttttgatggctggctgatcaacatcgagaactcgctgagtctggccgctgtggggaacatgcctcctttcctgcggtacctcaccacacagctgcaccggcaggtcccagggggcctggtgctctggtatgacagcgtggtgcaaagtgggcagctcaaatggcaagacgaactcaaccagcacaacagggtcttctttgattcctgcgacggcttcttcactaactataactggcgggaggagcacttggagcggatgctggggcaggctggggagcgccgggctgatgtgtacgtgggcgtggatgtgtttgctcgagggaacgtggtcggaggccgattcgacacagacaaggtgggtggtggctttcgtccaagggccagcggcccagtgcctcccctgggacctcatttcctcatggaccttccattcccgtctgcacctcaaaggaatgacagcagctgttcttcccagagtggggatcccgtggcactgagaaacaggtgtcctgccccggccaagctatgtccccactgaaacccctttcccggctatttctacaatcagataatgtatttttgtgtgggtgttaccagacagaggcgcgtcgttcccccgctgtccggtcctcggcgggcctgggcctcctgtcccagctgcgttccttgatcttccccgtgagggaagcctgcggggacgcacaggggcctgcagcgcctctcactgcggctcaggggcgaggacgggggaggtgcccagggtttggggatcggtaggtgtcatgacgagggagcattttctggcaaggcaggtcacaccagcacagaggaaggagcggggccaggccggtgcccctggcgtgggatgcgcagggctctgcctgcctctggtctatcagtcctgcccgttcccagagcctctttactgcccgtgattctgataatcgaatgagaggtgtgccagaggacaatgggaccgcgcagccacagccagttggggcccagcccctgcccccctgcccttgcagcagcgctgaccgcctctcccgcgccctcttctggcgggcttgtggaacgacgggggtgatgcccagcagcctccagtcgttggagctgatccgaaagcatggcttctccgtggctttgtttgcccccggctgggtgtatgagtgtctggagaagaaggatttcttccagaaccaggacaagttctggggccgactggagcgttatctgcccacacatagcatctgctccttgcctttcgtcacgtccttctgcctgggcatgggtgcacggagggtctgctatggccaggaagaggcggtagggccctggtaccacctgagcgcccaggagatccagcccttgtttggagaacacaggctgggaggggatggccggggctgggtgaggacgcactgctgcctggaggatgcctggcacggaggcagctccctgctcgtccggggtgtgatcccaccggaggttggaaatgtggctgtgaggtgggtgagtgacggaggacggtgggcccaccagcttctcccatcacacgtggtggccatggaactggacagatggggcagtggaggccagaacaaggacagaggacagacccagatgggttttttaaaattgtgatcaaaaatgcattaacgtgaaattcaccatcttgaccctgttgaagtgaacggtacaggagtgttaactctgcgtacgttgctacgtgacagatccctagaactgtgtcatcttgtaggactggactctccccattgcacattagccccccatcctcccccagccccccaaagccacccctttactctgcatctgtgagtttggatactttagatgccccatatgagggaatcccatacggtatttcagaactgagatgtttcagcccacaaaagaatctggccttgggggaggacttgtcccctggctacggacaggaccacgatgtgggagcatttggcacccaggccccctgttcctggagggaggggctggtggacgcgatttggagctggcttcgatttctcagtggtctctccacggcacccatcacaggacctttttccccaggttatttttattccctgcaggccccagtgccacccaagatttacctgtccatggtgtataagcttgaggggcccacggacgtcacagttgctttggagctgaccacaggggatgccggcagctgccacatcggtggcatctcagtgttgaacgcagaaacaagctcaagacacagcctccgacccctccgggtgccccccaccaagctggccagatgggtgggccgctgcggccggcagctgagtgggggctgggtccagcactgctacgaggtgagcctgcgtgggtgcctgctgctagacctcctcgtttgcttctcacggccgccgggtagtcgggaggaggagagcttcacctgtcggcttggagagatccaggtggtggacgctgccagcctgctggcccctctgccccaggtgcaggccgtcaccatctctcacatccgctggcagccatccgcctctgagcgggaggggccccctgctctgctccagctcagctgcaccctgcactggtccttcctcctctcacaagtccgttgcttccgaatccactgctggggagggatgagtgatgactctccgggcagggagctgccgaggccagagatgcccatgttcctggggttggcttttgccacccagtaccggatagtggacctgctggtggaagccgccgggcccggccaggatcgtcgcatggaatttctggtggagcctgtccccaaggaagggttccgggtacctcaggccgagtggggcagggcagttctgctttattcagcccctgcatgagcggatgctaaggccgggtggtctcctggcctcgggctgaggcctcttcccggctgtctgcccctggcctgcgctggacctgctaagtgcccacagtggcagcgaggtcccggtcccggggctggggtgggagaccccgggctgagtgctgtggctttctggtggggggcgatggaaacaggaaaccaagcagtgggatcgcagcgttggtcactgcgaggcgagtggcgggctttctgtttctgccttgtccctccccacggtacctggttcccaggtgaaaatgaaaggaggggagaagttgagaacagaacattccataaaggatatttcctaataggctgcaagatgctgatgccgagaatgatgattttctttcctgcagatgaaactattagaaagggtcttagattgtggcaggtaggctttggagcaggcgccgagacatttctgagcatgaggacgagctacagcagctcctggggtggggctgcctgcgggatggcgggagaggatgccctggagaaccgtcctcccagtgtggaaggcccttttccctgaggagtgggcattctgggccagccggcgctggcttcgtgcctccacgtgggccagccccagctgctccgtgtttcctggcgttggcaatttactgtgctgctgagtgtgaggtcatctccggagcgttttcagcagcccctggctctgcggcgtctcttccgggctgtgggcatgcagggaagtggctctgaggcagtctgcgctgtggccctgcctctgcccagcgagaggccgtgggctctggacaagccgcccttcaggctggggtagcaggtcagtccaggcaggaagcagcacctgccccccgcgccagcccagccccagcctgagtgcaggagctgcaggacccgcgggggcttttccagctactctgttccttcacgtcctcccttctcagcctcgtccaagcaccgggaagacctccaggctgaccccttgagcagcagtcagcacaggtgcgtgggggcgtgagggaggcagggtcttcaccacaggcgccttcctctgtccttcctgctctttcttctctgcccaggccgctgcagctgcacagcctctgctacacctgggctgcctgggaggcttcctggtgtggtgtctggaccccacggccttgggtcatcctgtggctggtctggggtggggtctgttgtggtccttccacggtgtcagtggcctgaagtccctcgcttttggggggggggtctctcacccccaggccacatagggccagtggtaggggttccctctatgtcgggcagtgctgagggctgggatgctctgtgaccccagctggagcccacacctaagggctggcatccacatcatttcaccctgcagtgagggaagaggccaccaggtggcagcacagccacacccgttcccacgtcagaggagggcaaggctgggtactcagcagccactctgagccggggctccttccaggagctgaaatccacctgtctccatcttccttgcctgcctgggtactcatgccaagcagagactgggattaggggttctgtgctcttgcctaattaggaacattctcccatgtctcttgtgtggtcccagaaggagaagtgagtttgccaaggatatggggcaggaggctccctctgctgaccccctgcagcctggagccagcccggggactgtcctgggtggagggcaggtgaacacaagctgctgccggggactgtcctgggtggacggcaggtgaacacaagcggctgccgcatgtagccactcactcgactttttttcagctgtgaccattcctgggagctctttgagcctttctgtctcatttggaaccagggggaaccaggaaggggctcctggcctctctgtgtcctctgcagtgggggttgtggggggcgcagcatccacgccttgctgcccttctttcatgaagtctgttttttaagtgctggttcccccgaatattttatgcagaggagggaaaatttatagtggcaattattttctcacagtctggtgagcaggcaattaattaggagtaagggggcctagtagagcgtggcgtgtggcagaatcgcaccgccccggctccccagcccaccgccatgcagggctcgcgtgcgggaaaactaatatgccggcgtttaagcctgtgcccctctgctgggtgtaactgcgctgaaataaatgatctgacaatgtgaaaaaaaaaaaa

SEQ ID NO: 5 - DNA, 5090 bp, Homo sapien
acagtgtcatggaggccgcggcggtgacggtcacccggtcggctacacggcggcggcggcggcagctgcaggggctggcggccccggaggcggggacgcaggaggagcaggaggatcaggagccgcggccgcggcggcggcggccgggaaggagcatcaaagatgaagaagaagagacagtctttcgagaggtggtcagtttttccccggaccccctgccagttagatattatgacaaggacaccaccaaaccaatcagcttttacttgtcttcgctggaggagctcttggcgtggaagccccgcttggaggatggctttaatgtggccctggagcccctggcgtgtcgccagccccctctgagcagccagaggccccggactttgttgtgtcatgacatgatgggcgggtacctggatgacaggttcattcagggctcggtggtgcagactccctatgctttctaccactggcagtgcatcgacgtctttgtgtacttcagccaccacaccgtcaccattcccccagtgggctggaccaacactgcccacaggcatggggtctgcgtgctggggactttcatcacggagtggaatgaagggggaaggctctgtgaagccttcctggccggggatgagcgctcgtaccaggcagtggctgaccggctggtccagatcactcagttttttcgttttgatggctggctgatcaacatcgagaactcgctgagtctggccgctgtggggaacatgcctcctttcctgcggtacctcaccacacagctgcaccggcaggtcccagggggcctggtgctctggtatgacagcgtggtgcaaagtgggcagctcaaatggcaagacgaactcaaccagcacaacagggtcttctttgattcctgcgacggcttcttcactaactataactggcgggaggagcacttggagcggatgctggggcaggctggggagcgccgggctgatgtgtacgtgggcgtggatgtgtttgctcgagggaacgtggtcggaggccgattcgacacagacaagtcgttggagctgatccgaaagcatggcttctccgtggctttgtttgcccccggctgggtgtatgagtgtctggagaagaaggatttcttccagaaccaggacaagttctggggccgactggagcgttatctgcccacacatagcatctgctccttgcctttcgtcacgtccttctgcctgggcatgggtgcacggagggtctgctatggccaggaagaggcggtagggccctggtaccacctgagcgcccaggagatccagcccttgtttggagaacacaggctgggaggggatggccggggctgggtgaggacgcactgctgcctggaggatgcctggcacggaggcagctccctgctcgtccggggtgtgatcccaccggaggttggaaatgtggctgtgaggtgggtgagtgacggaggacggtgggcccaccagcttctcccatcacacgtggtggccatggaactggacagatggggcagtggaggccagaacaaggacagaggacagacccagatgggttttttaaaattgtgatcaaaaatgcattaacgtgaaattcaccatcttgaccctgttgaagtgaacggtacaggagtgttaactctgcgtacgttgctacgtgacagatccctagaactgtgtcatcttgtaggactggactctccccattgcacattagccccccatcctcccccagccccccaaagccacccctttactctgcatctgtgagtttggatactttagatgccccatatgagggaatcccatacggtatttcagaactgagatgtttcagcccacaaaagaatctggccttgggggaggacttgtcccctggctacggacaggaccacgatgtgggagcatttggcacccaggccccctgttcctggagggaggggctggtggacgcgatttggagctggcttcgatttctcagtggtctctccacggcacccatcacaggacctttttccccaggttatttttattccctgcaggccccagtgccacccaagatttacctgtccatggtgtataagcttgaggggcccacggacgtcacagttgctttggagctgaccacaggggatgccggcagctgccacatcggtggcatctcagtgttgaacgcagaaacaagctcaagacacagcctccgacccctccgggtgccccccaccaagctggccagatgggtgggccgctgcggccggcagctgagtgggggctgggtccagcactgctacgaggtgagcctgcgtgggtgcctgctgctagacctcctcgtttgcttctcacggccgccgggtagtcgggaggaggagagcttcacctgtcggcttggagagatccaggtggtggacgctgccagcctgctggcccctctgccccaggtgcaggccgtcaccatctctcacatccgctggcagccatccgcctctgagcgggaggggccccctgctctgctccagctcagctgcaccctgcactggtccttcctcctctcacaagtccgttgcttccgaatccactgctggggagggatgagtgatgactctccgggcagggagctgccgaggccagagatgcccatgttcctggggttggcttttgccacccagtaccggatagtggacctgctggtggaagccgccgggcccggccaggatcgtcgcatggaatttctggtggagcctgtccccaaggaagggttccgggtacctcaggccgagtggggcagggcagttctgctttattcagcccctgcatgagcggatgctaaggccgggtggtctcctggcctcgggctgaggcctcttcccggctgtctgcccctggcctgcgctggacctgctaagtgcccacagtggcagcgaggtcccggtcccggggctggggtgggagaccccgggctgagtgctgtggctttctggtggggggcgatggaaacaggaaaccaagcagtgggatcgcagcgttggtcactgcgaggcgagtggcgggctttctgtttctgccttgtccctccccacggtacctggttcccaggtgaaaatgaaaggaggggagaagttgagaacagaacattccataaaggatatttcctaataggctgcaagatgctgatgccgagaatgatgattttctttcctgcagatgaaactattagaaagggtcttagattgtggcaggtaggctttggagcaggcgccgagacatttctgagcatgaggacgagctacagcagctcctggggtggggctgcctgcgggatggcgggagaggatgccctggagaaccgtcctcccagtgtggaaggcccttttccctgaggagtgggcattctgggccagccggcgctggcttcgtgcctccacgtgggccagccccagctgctccgtgtttcctggcgttggcaatttactgtgctgctgagtgtgaggtcatctccggagcgttttcagcagcccctggctctgcggcgtctcttccgggctgtgggcatgcagggaagtggctctgaggcagtctgcgctgtggccctgcctctgcccagcgagaggccgtgggctctggacaagccgcccttcaggctggggtagcaggtcagtccaggcaggaagcagcacctgccccccgcgccagcccagccccagcctgagtgcaggagctgcaggacccgcgggggcttttccagctactctgttccttcacgtcctcccttctcagcctcgtccaagcaccgggaagacctccaggctgaccccttgagcagcagtcagcacaggtgcgtgggggcgtgagggaggcagggtcttcaccacaggcgccttcctctgtccttcctgctctttcttctctgcccaggccgctgcagctgcacagcctctgctacacctgggctgcctgggaggcttcctggtgtggtgtctggaccccacggccttgggtcatcctgtggctggtctggggtggggtctgttgtggtccttccacggtgtcagtggcctgaagtccctcgcttttggggggggggtctctcacccccaggccacatagggccagtggtaggggttccctctatgtcgggcagtgctgagggctgggatgctctgtgaccccagctggagcccacacctaagggctggcatccacatcatttcaccctgcagtgagggaagaggccaccaggtggcagcacagccacacccgttcccacgtcagaggagggcaaggctgggtactcagcagccactctgagccggggctccttccaggagctgaaatccacctgtctccatcttccttgcctgcctgggtactcatgccaagcagagactgggattaggggttctgtgctcttgcctaattaggaacattctcccatgtctcttgtgtggtcccagaaggagaagtgagtttgccaaggatatggggcaggaggctccctctgctgaccccctgcagcctggagccagcccggggactgtcctgggtggagggcaggtgaacacaagctgctgccggggactgtcctgggtggacggcaggtgaacacaagcggctgccgcatgtagccactcactcgactttttttcagctgtgaccattcctgggagctctttgagcctttctgtctcatttggaaccagggggaaccaggaaggggctcctggcctctctgtgtcctctgcagtgggggttgtggggggcgcagcatccacgccttgctgcccttctttcatgaagtctgttttttaagtgctggttcccccgaatattttatgcagaggagggaaaatttatagtggcaattattttctcacagtctggtgagcaggcaattaattaggagtaagggggcctagtagagcgtggcgtgtggcagaatcgcaccgccccggctccccagcccaccgccatgcagggctcgcgtgcgggaaaactaatatgccggcgtttaagcctgtgcccctctgctgggtgtaactgcgctgaaataaatgatctgacaatgtgaaaaaaaaaaaa

SEQ ID NO: 6 - DNA, 5621 bp, Homo sapien
gcggcggtggcgggaaggagcatcaaagatgaagaagaagagacagtctttcgagaggtggtcagtttttccccggaccccctgccagttagatattatgacaaggacaccaccaaaccaatcagcttttacttgtcttcgctggaggagctcttggcgtggaagccccgcttggaggatggctttaatgtggccctggagcccctggcgtgtcgccagccccctctgagcagccagaggccccggactttgttgtgtcatgacatgatgggcgggtacctggatgacagggactttcatcacggagtggaatgaagggggaaggctctgtgaagccttcctggccggggatgagcgctcgtaccaggcagtggctgaccggctggtccagatcactcagttttttcgttttgatggctggctgatcaacatcgagaactcgctgagtctggccgctgtggggaacatgcctcctttcctgcggtacctcaccacacagctgcaccggcaggtcccagggggcctggtgctctggtatgacagcgtggtgcaaagtgggcagctcaaatggcaagacgaactcaaccagcacaacagggtcttctttgattcctgcgacggcttcttcactaactataactggcgggaggagcacttggagcggatgctggggcaggctggggagcgccgggctgatgtgtacgtgggcgtggatgtgtttgctcgagggaacgtggtcggaggccgattcgacacagacaaggtgggtggtggctttcgtccaagggccagcggcccagtgcctcccctgggacctcatttcctcatggaccttccattcccgtctgcacctcaaaggaatgacagcagctgttcttcccagagtggggatcccgtggcactgagaaacaggtgtcctgccccggccaagctatgtccccactgaaacccctttcccggctatttctacaatcagataatgtatttttgtgtgggtgttaccagacagaggcgcgtcgttcccccgctgtccggtcctcggcgggcctgggcctcctgtcccagctgcgttccttgatcttccccgtgagggaagcctgcggggacgcacaggggcctgcagcgcctctcactgcggctcaggggcgaggacgggggaggtgcccagggtttggggatcggtaggtgtcatgacgagggagcattttctggcaaggcaggtcacaccagcacagaggaaggagcggggccaggccggtgcccctggcgtgggatgcgcagggctctgcctgcctctggtctatcagtcctgcccgttcccagagccccagggatgttctcagcccttaatttagctttaaatgagtaaattaatccaataactaaagagcctctttactgcccgtgattctgataatcgaatgagaggtgtgccagaggacaatgggaccgcgcagccacagccagttggggcccagcccctgcccccctgcccttgcagcagcgctgaccgcctctcccgcgccctcttctggcgggcttgtggaacgacgggggtgatgcccagcagcctccagtcgttggagctgatccgaaagcatggcttctccgtggctttgtttgcccccggctgggtgtatgagtgtctggagaagaaggatttcttccagaaccaggacaagttctggggccgactggagcgttatctgcccacacatagcatctgctccttgcctttcgtcacgtccttctgcctgggcatgggtgcacggagggtctgctatggccaggaagaggcggtagggccctggtaccacctgagcgcccaggagatccagcccttgtttggagaacacaggctgggaggggatggccggggctgggtgaggacgcactgctgcctggaggatgcctggcacggaggcagctccctgctcgtccggggtgtgatcccaccggaggttggaaatgtggctgtgaggtgggtgagtgacggaggacggtgggcccaccagcttctcccatcacacgtggtggccatggaactggacagatggggcagtggaggccagaacaaggacagaggacagacccagatgggttttttaaaattgtgatcaaaaatgcattaacgtgaaattcaccatcttgaccctgttgaagtgaacggtacaggagtgttaactctgcgtacgttgctacgtgacagatccctagaactgtgtcatcttgtaggactggactctccccattgcacattagccccccatcctcccccagccccccaaagccacccctttactctgcatctgtgagtttggatactttagatgccccatatgagggaatcccatacggtatttcagaactgagatgtttcagcccacaaaagaatctggccttgggggaggacttgtcccctggctacggacaggaccacgatgtgggagcatttggcacccaggccccctgttcctggagggaggggctggtggacgcgatttggagctggcttcgatttctcagtggtctctccacggcacccatcacaggacctttttccccaggttatttttattccctgcaggccccagtgccacccaagatttacctgtccatggtgtataagcttgaggggcccacggacgtcacagttgctttggagctgaccacaggggatgccggcagctgccacatcggtggcatctcagtgttgaacgcagaaacaagctcaagacacagcctccgacccctccgggtgccccccaccaagctggccagatgggtgggccgctgcggccggcagctgagtgggggctgggtccagcactgctacgaggtgagcctgcgtgggtgcctgctgctagacctcctcgtttgcttctcacggccgccgggtagtcgggaggaggagagcttcacctgtcggcttggagagatccaggtggtggacgctgccagcctgctggcccctctgccccaggtgcaggccgtcaccatctctcacatccgctggcagccatccgcctctgagcgggaggggccccctgctctgctccagctcagctgcaccctgcactggtccttcctcctctcacaagtccgttgcttccgaatccactgctggggagggatgagtgatgactctccgggcagggagctgccgaggccagagatgcccatgttcctggggttggcttttgccacccagtaccggatagtggacctgctggtggaagccgccgggcccggccaggatcgtcgcatggaatttctggtggagcctgtccccaaggaagggttccgggtacctcaggccgagtggggcagggcagttctgctttattcagcccctgcatgagcggatgctaaggccgggtggtctcctggcctcgggctgaggcctcttcccggctgtctgcccctggcctgcgctggacctgctaagtgcccacagtggcagcgaggtcccggtcccggggctggggtgggagaccccgggctgagtgctgtggctttctggtggggggcgatggaaacaggaaaccaagcagtgggatcgcagcgttggtcactgcgaggcgagtggcgggctttctgtttctgccttgtccctccccacggtacctggttcccaggtgaaaatgaaaggaggggagaagttgagaacagaacattccataaaggatatttcctaataggctgcaagatgctgatgccgagaatgatgattttctttcctgcagatgaaactattagaaagggtcttagattgtggcaggtaggctttggagcaggcgccgagacatttctgagcatgaggacgagctacagcagctcctggggtggggctgcctgcgggatggcgggagaggatgccctggagaaccgtcctcccagtgtggaaggcccttttccctgaggagtgggcattctgggccagccggcgctggcttcgtgcctccacgtgggccagccccagctgctccgtgtttcctggcgttggcaatttactgtgctgctgagtgtgaggtcatctccggagcgttttcagcagcccctggctctgcggcgtctcttccgggctgtgggcatgcagggaagtggctctgaggcagtctgcgctgtggccctgcctctgcccagcgagaggccgtgggctctggacaagccgcccttcaggctggggtagcaggtcagtccaggcaggaagcagcacctgccccccgcgccagcccagccccagcctgagtgcaggagctgcaggacccgcgggggcttttccagctactctgttccttcacgtcctcccttctcagcctcgtccaagcaccgggaagacctccaggctgaccccttgagcagcagtcagcacaggtgcgtgggggcgtgagggaggcagggtcttcaccacaggcgccttcctctgtccttcctgctctttcttctctgcccaggccgctgcagctgcacagcctctgctacacctgggctgcctgggaggcttcctggtgtggtgtctggaccccacggccttgggtcatcctgtggctggtctggggtggggtctgttgtggtccttccacggtgtcagtggcctgaagtccctcgcttttggggggggggtctctcacccccaggccacatagggccagtggtaggggttccctctatgtcgggcagtgctgagggctgggatgctctgtgaccccagctggagcccacacctaagggctggcatccacatcatttcaccctgcagtgagggaagaggccaccaggtggcagcacagccacacccgttcccacgtcagaggagggcaaggctgggtactcagcagccactctgagccggggctccttccaggagctgaaatccacctgtctccatcttccttgcctgcctgggtactcatgccaagcagagactgggattaggggttctgtgctcttgcctaattaggaacattctcccatgtctcttgtgtggtcccagaaggagaagtgagtttgccaaggatatggggcaggaggctccctctgctgaccccctgcagcctggagccagcccggggactgtcctgggtggagggcaggtgaacacaagctgctgccggggactgtcctgggtggacggcaggtgaacacaagcggctgccgcatgtagccactcactcgactttttttcagctgtgaccattcctgggagctctttgagcctttctgtctcatttggaaccagggggaaccaggaaggggctcctggcctctctgtgtcctctgcagtgggggttgtggggggcgcagcatccacgccttgctgcccttctttcatgaagtctgttttttaagtgctggttcccccgaatattttatgcagaggagggaaaatttatagtggcaattattttctcacagtctggtgagcaggcaattaattaggagtaagggggcctagtagagcgtggcgtgtggcagaatcgcaccgccccggctccccagcccaccgccatgcagggctcgcgtgcgggaaaactaatatgccggcgtttaagcctgtgcccctctgctgggtgtaactgcgctgaaataaatgatctgacaatgtgaaaaaaaaaaaa

SEQ ID NO: 7 - DNA, 5519 bp, Homo sapien
acagtgtcatggaggccgcggcggtgacggtcacccggtcggctacacggcggcggcggcggcagctgcaggggctggcggccccggaggcggggacgcaggaggagcaggaggatcaggagccgcggccgcggcggcggcggccgggaaggagcatcaaagatgaagaagaagagacagtctttcgagaggtggtcagtttttccccggaccccctgccagttagatattatgacaaggacaccaccaaaccaatcagcttttacttgtcttcgctggaggagctcttggcgtggaagccccgcttggaggatggctttaatgtggccctggagcccctggcgtgtcgccagccccctctgagcagccagaggccccggactttgttgtgtcatgacatgatgggcgggtacctggatgacaggttcattcagggctcggtggtgcagactccctatgctttctaccactggcagtgcatcgacgtctttgtgtacttcagccaccacaccgtcaccattcccccagtgggctggaccaacactgcccacaggcatggggtctgcgtgctggggactttcatcacggagtggaatgaagggggaaggctctgtgaagccttcctggccggggatgagcgctcgtaccaggcagtggctgaccggctggtccagatcactcagttttttcgttttgatggctggctgatcaacatcgagaactcgctgagtctggccgctgtggggaacatgcctcctttcctgcggtacctcaccacacagctgcaccggcaggtcccagggggcctggtgctctggtatgacagcgtggtgcaaagtgggcagctcaaatggcaagacgaactcaaccagcacaacagggtcttctttgattcctgcgacggcttcttcactaactataactggcgggaggagcacttggagcggatgctggggcaggctggggagcgccgggctgatgtgtacgtgggcgtggatgtgtttgctcgagggaacgtggtcggaggccgattcgacacagacaaggtgggtggtggctttcgtccaagggccagcggcccagtgcctcccctgggacctcatttcctcatggaccttccattcccgtctgcacctcaaaggaatgacagcagctgttcttcccagagtggggatcccgtggcactgagaaacaggtgtcctgccccggccaagctatgtccccactgaaacccctttcccggctatttctacaatcagataatgtatttttgtgtgggtgttaccagacagaggcgcgtcgttcccccgctgtccggtcctcggcgggcctgggcctcctgtcccagctgcgttccttgatcttccccgtgagggaagcctgcggggacgcacaggggcctgcagcgcctctcactgcggctcaggggcgaggacgggggaggtgcccagggtttggggatcggtaggtgtcatgacgagggagcattttctggcaaggcaggtcacaccagcacagaggaaggagcggggccaggccggtgcccctggcgtgggatgcgcagggctctgcctgcctctggtctatcagtcctgcccgttcccagagccccagggatgttctcagcccttaatttagctttaaatgagtaaattaatccaataactaaagagcctctttactgcccgtgattctgataatcgaatgagaggtgtgccagaggacaatgggaccgcgcagccacagccagttggggcccagcccctgcccccctgcccttgcagcagcgctgaccgcctctcccgcgccctcttctggcgggcttgtggaacgacgggggtgatgcccagcagcctccagtcgttggagctgatccgaaagcatggcttctccgtggctttgtttgcccccggctgggtgtatgagtgtctggagaagaaggatttcttccagaaccaggacaagttctggggccgactggagcgttatctgcccacacatagcatctgctccttgcctttcgtcacgtccttctgcctgggcatgggtgcacggagggtctgctatggccaggaagaggcggtagggccctggtaccacctgagcgcccaggagatccagcccttgtttggagaacacaggctgggaggggatggccggggctgggtgaggacgcactgctgcctggaggatgcctggcacggaggcagctccctgctcgtccggggtgtgatcccaccggaggttggaaatgtggctgtgaggtgggtgagtgacggaggacggtgggcccaccagcttctcccatcacacgtggtggccatggaactggacagatggggcagtggaggccagaacaaggacagaggacagacccagatgggttttttaaaattgtgatcaaaaatgcattaacgtgaaattcaccatcttgaccctgttgaagtgaacggtacaggagtgttaactctgcgtacgttgctacgtgacagatccctagaactgtgtcatcttgtaggactggactctccccattgcacattagccccccatcctcccccagccccccaaagccacccctttactctgcatctgtgagtttggatactttagatgccccatatgagggaatcccatacggtatttcagaactgagatgtttcagcccacaaaagaatctggccttgggggaggacttgtcccctggctacggacaggaccacgatgtgggagcatttggcacccaggccccctgttcctggagggaggggctggtggacgcgatttggagctggcttcgatttctcagtggtctctccacggcacccatcacaggacctttttccccaggttatttttattccctgcaggccccagtgccacccaagatttacctgtccatggtgtataagcttgaggggcccacggacgtcacagttgctttggagctgaccacaggggatgccggcagctgccacatcggtggcatctcagtgttgaacgcagaaacaagctcaagacacagcctccgacccctccgggtgccccccaccaagctggccagatgggtgggccgctgcggccggcagctgagtgggggctgggtccagcactgctacgaggtgagcctgcgtgggtgcctgctgctagacctcctcgtttgcttctcacggccgccgggtagtcgggaggaggagagcttcacctgtcggcttggagagatccaggtggtggacgctgccagcctgctggcccctctgccccaggtgcaggccgtcaccatctctcacatccgctggcagccatccgcctctgagcgggaggggccccctgctctgctccagctcagctgcaccctgcactggtccttcctcctctcacaagtccgttgcttccgaatccactgctggggagggatgagtgatgactctccgggcagggagctgccgaggccagagatgcccatgttcctggggttggcttttgccacccagtaccggatagtggacctgctggtggaagccgccgggcccggccaggatcgtcgcatggaatttctggtggagcctgtccccaaggaagggttccgggtacctcaggccgagtggggcagggcagttctgctttattcagcccctgcatgagcggatgctaaggccgggtggtctcctggcctcgggctgaggcctcttcccggctgtctgcccctggcctgcgctggacctgctaagtgcccacagtggcagcgaggtcccggtcccggggctggggtgggagaccccgggctgagtgctgtggctttctggtggggggcgatggaaacaggaaaccaagcagtgggatcgcagcgttggtcactgcgaggcgagtggcgggctttctgtttctgccttgtccctccccacggtacctggttcccaggtgaaaatgaaaggaggggagaagttgagaacagaacattccataaaggatatttcctaataggctgcaagatgctgatgccgagaatgatgattttctttcctgcagatgaaactattagaaagggtcttagattgtggcaggtaggctttggagcaggcgccgagacatttctgagcatgaggacgagctacagcagctcctggggtggggctgcctgcgggatggcgggagaggatgccctggagaaccgtcctcccagtgtggaaggcccttttccctgaggagtgggcattctgggccagccggcgctggcttcgtgcctccacgtgggccagccccagctgctccgtgtttcctggcgttggcaatttactgtgctgctgagtgtgaggtcatctccggagcgttttcagcagcccctggctctgcggcgtctcttccgggctgtgggcatgcagggaagtggctctgaggcagtctgcgctgtggccctgcctctgcccagcgagaggccgtgggctctggacaagccgcccttcaggctggggtagcaggtcagtccaggcaggaagcagcacctgccccccgcgccagcccagccccagcctgagtgcaggagctgcaggacccgcgggggcttttccagctactctgttccttcacgtcctcccttctcagcctcgtccaagcaccgggaagacctccaggctgaccccttgagcagcagtcagcacagtgagggaagaggccaccaggtggcagcacagccacacccgttcccacgtcagaggagggcaaggctgggtactcagcagccactctgagccggggctccttccaggagctgaaatccacctgtctccatcttccttgcctgcctgggtactcatgccaagcagagactgggattaggggttctgtgctcttgcctaattaggaacattctcccatgtctcttgtgtggtcccagaaggagaagtgagtttgccaaggatatggggcaggaggctccctctgctgaccccctgcagcctggagccagcccggggactgtcctgggtggagggcaggtgaacacaagctgctgccggggactgtcctgggtggacggcaggtgaacacaagcggctgccgcatgtagccactcactcgactttttttcagctgtgaccattcctgggagctctttgagcctttctgtctcatttggaaccagggggaaccaggaaggggctcctggcctctctgtgtcctctgcagtgggggttgtggggggcgcagcatccacgccttgctgcccttctttcatgaagtctgttttttaagtgctggttcccccgaatattttatgcagaggagggaaaatttatagtggcaattattttctcacagtctggtgagcaggcaattaattaggagtaagggggcctagtagagcgtggcgtgtggcagaatcgcaccgccccggctccccagcccaccgccatgcagggctcgcgtgcgggaaaactaatatgccggcgtttaagcctgtgcccctctgctgggtgtaactgcgctgaaataaatgatctgacaatgtgaaaaaaaaaaaa

SEQ ID NO: 8 - DNA, 6102 bp, Homo sapien
acagtgtcatggaggccgcggcggtgacggtcacccggtcggctacacggcggcggcggcggcagctgcaggggctggcggccccggaggcggggacgcaggaggagcaggaggatcaggagccgcggccgcggcggcggcggccgggaaggagcatcaaagatgaagaagaagagacagtctttcgagaggtggtcagtttttccccggaccccctgccagttagatattatgacaaggacaccaccaaaccaatcagcttttacttgtcttcgctggaggagctcttggcgtggaagccccgcttggaggatggctttaatgtggccctggagcccctggcgtgtcgccagccccctctgagcagccagaggccccggactttgttgtgtcatgacatgatgggcgggtacctggatgacaggttcattcagggctcggtggtgcagactccctatgctttctaccactggcagtgcatcgacgtctttgtgtacttcagccaccacaccgtcaccattcccccagtgggctggaccaacactgcccacaggcatggggtctgcgtgctggggactttcatcacggagtggaatgaagggggaaggctctgtgaagccttcctggccggggatgagcgctcgtaccaggcagtggctgaccggctggtccagatcactcagttttttcgttttgatggctggctgatcaacatcgagaactcgctgagtctggccgctgtggggaacatgcctcctttcctgcggtacctcaccacacagctgcaccggcaggtcccagggggcctggtgctctggtatgacagcgtggtgcaaagtgggcagctcaaatggcaagacgaactcaaccagcacaacagggtcttctttgattcctgcgacggcttcttcactaactataactggcgggaggagcacttggagcggatgctggggcaggctggggagcgccgggctgatgtgtacgtgggcgtggatgtgtttgctcgagggaacgtggtcggaggccgattcgacacagacaaggtgggtggtggctttcgtccaagggccagcggcccagtgcctcccctgggacctcatttcctcatggaccttccattcccgtctgcacctcaaaggaatgacagcagctgttcttcccagagtggggatcccgtggcactgagaaacaggtgtcctgccccggccaagctatgtccccactgaaacccctttcccggctatttctacaatcagataatgtatttttgtgtgggtgttaccagacagaggcgcgtcgttcccccgctgtccggtcctcggcgggcctgggcctcctgtcccagctgcgttccttgatcttccccgtgagggaagcctgcggggacgcacaggggcctgcagcgcctctcactgcggctcaggggcgaggacgggggaggtgcccagggtttggggatcggtaggtgtcatgacgagggagcattttctggcaaggcaggtcacaccagcacagaggaaggagcggggccaggccggtgcccctggcgtgggatgcgcagggctctgcctgcctctggtctatcagtcctgcccgttcccagagccccagggatgttctcagcccttaatttagctttaaatgagtaaattaatccaataactaaagagcctctttactgcccgtgattctgataatcgaatgagaggtgtgccagaggacaatgggaccgcgcagccacagccagttggggcccagcccctgcccccctgcccttgcagcagcgctgaccgcctctcccgcgccctcttctggcgggcttgtggaacgacgggggtgatgcccagcagcctccagtcgttggagctgatccgaaagcatggcttctccgtggctttgtttgcccccggctgggtgtatgagtgtctggagaagaaggatttcttccagaaccaggacaagttctggggccgactggagcgttatctgcccacacatagcatctgctccttgcctttcgtcacgtccttctgcctgggcatgggtgcacggagggtctgctatggccaggaagaggcggtagggccctggtaccacctgagcgcccaggagatccagcccttgtttggagaacacaggctgggaggggatggccggggctgggtgaggacgcactgctgcctggaggatgcctggcacggaggcagctccctgctcgtccggggtgtgatcccaccggaggttggaaatgtggctgtgaggtgggtgagtgacggaggacggtgggcccaccagcttctcccatcacacgtggtggccatggaactggacagatggggcagtggaggccagaacaaggacagaggacagacccagatgggttttttaaaattgtgatcaaaaatgcattaacgtgaaattcaccatcttgaccctgttgaagtgaacggtacaggagtgttaactctgcgtacgttgctacgtgacagatccctagaactgtgtcatcttgtaggactggactctccccattgcacattagccccccatcctcccccagccccccaaagccacccctttactctgcatctgtgagtttggatactttagatgccccatatgagggaatcccatacggtatttcagaactgagatgtttcagcccacaaaagaatctggccttgggggaggacttgtcccctggctacggacaggaccacgatgtgggagcatttggcacccaggccccctgttcctggagggaggggctggtggacgcgatttggagctggcttcgatttctcagtggtctctccacggcacccatcacaggacctttttccccaggttatttttattccctgcaggccccagtgccacccaagatttacctgtccatggtgtataagcttgaggggcccacggacgtcacagttgctttggagctgaccacaggggatgccggcagctgccacatcggtggcatctcagtgttgaacgcagaaacaagctcaagacacagcctccgacccctccgggtgccccccaccaagctggccagatgggtgggccgctgcggccggcagctgagtgggggctgggtccagcactgctacgaggtgagcctgcgtgggtgcctgctgctagacctcctcgtttgcttctcacggccgccgggtagtcgggaggaggagagcttcacctgtcggcttggagagatccaggtgatgcttcccagaggggctcgggctgggctggctgtttgtccagctggagtgggggtggaggccgccccaggccgcccccttcttgggttcagcggggaactggggtggaggagtcagggaggggaaatgtgtgcgtgggggcaccctctccccgcccccgggcgtccagccgtgctgagccttctctcctgccaggtggtggacgctgccagcctgctggcccctctgccccaggtgcaggccgtcaccatctctcacatccgctggcagccatccgcctctgagcgggaggggccccctgctctgctccagctcagctgcaccctgcactggtccttcctcctctcacaagtccgttgcttccgaatccactgctggggagggatgagtgatgactctccgggcagggagctgccgaggccagagatgcccatgttcctggggttggcttttgccacccagtaccggatagtggacctgctggtggaagccgccgggcccggccaggatcgtcgcatggaatttctggtggagcctgtccccaaggaagggttccgggtacctcaggccgagtggggcagggcagttctgctttattcagcccctgcatgagcggatgctaaggccgggtggtctcctggcctcgggctgaggcctcttcccggctgtctgcccctggcctgcgctggacctgctaagtgcccacagtggcagcgaggtcccggtcccggggctggggtgggagaccccgggctgagtgctgtggctttctggtggggggcgatggaaacaggaaaccaagcagtgggatcgcagcgttggtcactgcgaggcgagtggcgggctttctgtttctgccttgtccctccccacggtacctggttcccaggtgaaaatgaaaggaggggagaagttgagaacagaacattccataaaggatatttcctaataggctgcaagatgctgatgccgagaatgatgattttctttcctgcagatgaaactattagaaagggtcttagattgtggcaggtaggctttggagcaggcgccgagacatttctgagcatgaggacgagctacagcagctcctggggtggggctgcctgcgggatggcgggagaggatgccctggagaaccgtcctcccagtgtggaaggcccttttccctgaggagtgggcattctgggccagccggcgctggcttcgtgcctccacgtgggccagccccagctgctccgtgtttcctggcgttggcaatttactgtgctgctgagtgtgaggtcatctccggagcgttttcagcagcccctggctctgcggcgtctcttccgggctgtgggcatgcagggaagtggctctgaggcagtctgcgctgtggccctgcctctgcccagcgagaggccgtgggctctggacaagccgcccttcaggctggggtagcaggtcagtccaggcaggaagcagcacctgccccccgcgccagcccagccccagcctgagtgcaggagctgcaggacccgcgggggcttttccagctactctgttccttcacgtcctcccttctcagcctcgtccaagcaccgggaagacctccaggctgaccccttgagcagcagtcagcacaggtgcgtgggggcgtgagggaggcagggtcttcaccacaggcgccttcctctgtccttcctgctctttcttctctgcccaggccgctgcagctgcacagcctctgctacacctgggctgcctgggaggcttcctggtgtggtgtctggaccccacggccttgggtcatcctgtggctggtctggggtggggtctgttgtggtccttccacggtgtcagtggcctgaagtccctcgcttttggggggggggtctctcacccccaggccacatagggccagtggtaggggttccctctatgtcgggcagtgctgagggctgggatgctctgtgaccccagctggagcccacacctaagggctggcatccacatcatttcaccctgcagtgagggaagaggccaccaggtggcagcacagccacacccgttcccacgtcagaggagggcaaggctgggtactcagcagccactctgagccggggctccttccaggagctgaaatccacctgtctccatcttccttgcctgcctgggtactcatgccaagcagagactgggattaggggttctgtgctcttgcctaattaggaacattctcccatgtctcttgtgtggtcccagaaggagaagtgagtttgccaaggatatggggcaggaggctccctctgctgaccccctgcagcctggagccagcccggggactgtcctgggtggagggcaggtgaacacaagctgctgccggggactgtcctgggtggacggcaggtgaacacaagcggctgccgcatgtagccactcactcgactttttttcagctgtgaccattcctgggagctctttgagcctttctgtctcatttggaaccagggggaaccaggaaggggctcctggcctctctgtgtcctctgcagtgggggttgtggggggcgcagcatccacgccttgctgcccttctttcatgaagtctgttttttaagtgctggttcccccgaatattttatgcagaggagggaaaatttatagtggcaattattttctcacagtctggtgagcaggcaattaattaggagtaagggggcctagtagagcgtggcgtgtggcagaatcgcaccgccccggctccccagcccaccgccatgcagggctcgcgtgcgggaaaactaatatgccggcgtttaagcctgtgcccctctgctgggtgtaactgcgctgaaataaatgatctgacaatgtgaaaaaaaaaaaa

SEQ ID NO: 9 - DNA, 3177 bp, Homo sapien
acagtgtcatggaggccgcggcggtgacggtcacccggtcggctacacggcggcggcggcggcagctgcaggggctggcggccccggaggcggggacgcaggaggagcaggaggatcaggagccgcggccgcggcggcggcggccgggaaggagcatcaaagatgaagaagaagagacagtctttcgagaggtggtcagtttttccccggaccccctgccagttagatattatgacaaggacaccaccaaaccaatcagcttttacttgtcttcgctggaggagctcttggcgtggaagccccgcttggaggatggctttaatgtggccctggagcccctggcgtgtcgccagccccctctgagcagccagaggccccggactttgttgtgtcatgacatgatgggcgggtacctggatgacaggttcattcagggctcggtggtgcagactccctatgctttctaccactggcagtgcatcgacgtctttgtgtacttcagccaccacaccgtcaccattcccccagtgggctggaccaacactgcccacaggcatggggtctgcgtgctggggactttcatcacggagtggaatgaagggggaaggctctgtgaagccttcctggccggggatgagcgctcgtaccaggcagtggctgaccggctggtccagatcactcagttttttcgttttgatggctggctgatcaacatcgagaactcgctgagtctggccgctgtggggaacatgcctcctttcctgcggtacctcaccacacagctgctggtggaagccgccgggcccggccaggatcgtcgcatggaatttctggtggagcctgtccccaaggaagggttccgggtacctcaggccgagtggggcagggcagttctgctttattcagcccctgcatgagcggatgctaaggccgggtggtctcctggcctcgggctgaggcctcttcccggctgtctgcccctggcctgcgctggacctgctaagtgcccacagtggcagcgaggtcccggtcccggggctggggtgggagaccccgggctgagtgctgtggctttctggtggggggcgatggaaacaggaaaccaagcagtgggatcgcagcgttggtcactgcgaggcgagtggcgggctttctgtttctgccttgtccctccccacggtacctggttcccaggtgaaaatgaaaggaggggagaagttgagaacagaacattccataaaggatatttcctaataggctgcaagatgctgatgccgagaatgatgattttctttcctgcagatgaaactattagaaagggtcttagattgtggcaggtaggctttggagcaggcgccgagacatttctgagcatgaggacgagctacagcagctcctggggtggggctgcctgcgggatggcgggagaggatgccctggagaaccgtcctcccagtgtggaaggcccttttccctgaggagtgggcattctgggccagccggcgctggcttcgtgcctccacgtgggccagccccagctgctccgtgtttcctggcgttggcaatttactgtgctgctgagtgtgaggtcatctccggagcgttttcagcagcccctggctctgcggcgtctcttccgggctgtgggcatgcagggaagtggctctgaggcagtctgcgctgtggccctgcctctgcccagcgagaggccgtgggctctggacaagccgcccttcaggctggggtagcaggtcagtccaggcaggaagcagcacctgccccccgcgccagcccagccccagcctgagtgcaggagctgcaggacccgcgggggcttttccagctactctgttccttcacgtcctcccttctcagcctcgtccaagcaccgggaagacctccaggctgaccccttgagcagcagtcagcacaggtgcgtgggggcgtgagggaggcagggtcttcaccacaggcgccttcctctgtccttcctgctctttcttctctgcccaggccgctgcagctgcacagcctctgctacacctgggctgcctgggaggcttcctggtgtggtgtctggaccccacggccttgggtcatcctgtggctggtctggggtggggtctgttgtggtccttccacggtgtcagtggcctgaagtccctcgcttttggggggggggtctctcacccccaggccacatagggccagtggtaggggttccctctatgtcgggcagtgctgagggctgggatgctctgtgaccccagctggagcccacacctaagggctggcatccacatcatttcaccctgcagtgagggaagaggccaccaggtggcagcacagccacacccgttcccacgtcagaggagggcaaggctgggtactcagcagccactctgagccggggctccttccaggagctgaaatccacctgtctccatcttccttgcctgcctgggtactcatgccaagcagagactgggattaggggttctgtgctcttgcctaattaggaacattctcccatgtctcttgtgtggtcccagaaggagaagtgagtttgccaaggatatggggcaggaggctccctctgctgaccccctgcagcctggagccagcccggggactgtcctgggtggagggcaggtgaacacaagctgctgccggggactgtcctgggtggacggcaggtgaacacaagcggctgccgcatgtagccactcactcgactttttttcagctgtgaccattcctgggagctctttgagcctttctgtctcatttggaaccagggggaaccaggaaggggctcctggcctctctgtgtcctctgcagtgggggttgtggggggcgcagcatccacgccttgctgcccttctttcatgaagtctgttttttaagtgctggttcccccgaatattttatgcagaggagggaaaatttatagtggcaattattttctcacagtctggtgagcaggcaattaattaggagtaagggggcctagtagagcgtggcgtgtggcagaatcgcaccgccccggctccccagcccaccgccatgcagggctcgcgtgcgggaaaactaatatgccggcgtttaagcctgtgcccctctgctgggtgtaactgcgctgaaataaatgatctgacaatgtgaaaaaaaaaaaa

SEQ ID NO: 10 - DNA, 1956 bp, Homo sapien
ccggctccacccccaagccaggcgaggcaggttccgaggttggaacacctggcgagtcctcggtgtcggtggccggcagtcatctcgcggccgttcaggataagccagagacatgggaaaaccaatggaagtgtttcaaagttcttctctttaatcacttctgtatccagctgcctttgatttgtggaacctattattttacagagtatttcaatattccttatgattgggaaagaatgccaagatggtattttcttttggcaagatgctttggttgtgcagtcattgaagatacttggcactattttctgcatagactcttacaccacaaaagaatatacaagtatattcataaagttcatcatgagtttcaggctccatttggaatggaagctgaatatgcacatcctttggagactctaattcttggaactggatttttcattggaatcgtgcttttgtgtgatcatgtaattcttctttgggcatgggtgaccattcgtttattagaaactattgatgtccatagtggttatgatattcctctcaaccctttaaatctgatccctttctatgctggttctcggcatcatgatttccaccacatgaacttcattggaaactatgcttcaacatttacatggtgggatcgaatttttggaacagactctcagtataatgcctataatgaaaagaggaagaagtttgagaaaaagactgaataaatatctcacgtaaaccttcctgaaagataaacgttttcctgaattcagaaactagtagctaacattgcttctggagagcagaaataagcatgtcttctggctactaagtgataaaaagaacattaacaacctttaattaccttcctagtgggaactttttctactttacctacaagttctatatatgtagaaatgaataaatatatatttaagtacagttttcatgaggaagttttaaaagaccatgttcctaagcttccaagaaggttttggatactagaagtattaatctatggcttttctcccagtaaaaccataggcctgaagttcacattgggtctttaaatcttttagatatatactggtcatttcagaaaattcttcatagtggtattggccttatatttaactttttttttattttttttttgagacaaagccacactctgtctccttggctggagtgtggtggcacagtctcagctcactgcaacctctgcctcccagttcaagcaattcttctgcctcagcctcccaagtagctgggattacaggcacccgccaccacgcccagctaatttttgtatttttgtagagatggggtttcacgatgttggccaggctggtctcaaacttctgacctcaagtgatctgcccaccttggcctcccaaagtgctgggattacaggtgtaagccactgcgcccggcctttttaactttaaacatgttttagaattcacctaaagatcaaaatatcatggattgaacctcatcaattgatagcagtgagtgactgaagcttccaaatcaagaaaagccggcaccaagaacttccattctaatctagagctgaccagtttgagctgattctctctttgaagagtccttcttgattgcagtgcagtactggcatttctgaatggatgtaagtggagtattttagtctaaaggcttttcaaattacttgaatttttttaaaaattgaggagctttatttctatttacccttccatttttgtatatcaaatttccattgtcattaaaaactgtatcttgaaactttgtgaactgacttgctgtatttgcactttgagctcttgaaataaatgtgatttttgtgtgattatctggtttccagttttaaacattaactgtcaccttttattcttaaacttgaaagtacagaaatcattaaattattaagttgtacaataaagggattggtttctt

SEQ ID NO: 11 - DNA, 1488 bp, Homo sapien
gactccaagtcccagctgtgcccgggacgctgcgcgcccccgggactccatttcccagagtgccccgccccagcctcccggccccgccccccacctggctccgcgggcagccggagcgcacccggccggaagccgctgtcggggagccggcggtggggctggacgcaggtgcaactgacatgggtgaaccccagggatccatgcggattctagtgacagggggctctgggctggtaggcaaagccatccagaaggtggtagcagatggagctggacttcctggagaggactgggtgtttgtctcctctaaagacgccgatctcacggatacagcacagacccgcgccctgtttgagaaggtccaacccacacacgtcatccatcttgctgcaatggtggggggcctgttccggaatatcaaatacaatttggacttctggaggaaaaacgtgcacatgaacgacaacgtcctgcactcggccttcgaggtgggcgcccgcaaggtggtgtcctgcctgtccacctgtatcttccctgacaagacgacctacccgatagatgagaccatgatccacaatgggcctccccacaacagcaattttgggtactcgtatgccaagaggatgatcgacgtgcagaacagggcctacttccagcagtacggctgcaccttcaccgctgtcatccccaccaacgtcttcgggccccacgacaacttcaacatcgaggatggccacgtgctgcctggcctcatccacaaggtgcacctggccaagagcagcggctcggccctgacggtgtggggtacagggaatccgcggaggcagttcatatactcgctggacctggcccagctctttatctgggtcctgcgggagtacaatgaagtggagcccatcatcctctccgtgggcgaggaagatgaggtctccatcaaggaggcagccgaggcggtggtggaggccatggacttccatggggaagtcacctttgatacaaccaagtcggatgggcagtttaagaagacagccagtaacagcaagctgaggacctacctgcccgacttccggttcacacccttcaagcaggcggtgaaggagacctgtgcttggttcactgacaactacgagcaggcccggaagtgaagctggaagacaggatcaggtgccagcggaccatcggctggcagagcccagcggccaccacccgtcaaccctgccaggagctgagggcaccacccagcaacctgggcctgcattccatccgctctgcagccccaagcatctttccagtggggcccccattcacgttggtcctcagggaaaccagggtccggggcaggcccggcgctttgctccccacaccagccccctgcgcgtgtccactctgatcctgcatcccactccctgggagccaataaagtgcattttcacaggcaaaaaaggggaagaaaacgacagggggaggtagaaggagtaggaggagtga

SEQ ID NO: 12 - DNA, 1757 bp, Homo sapien
gactccaagtcccagctgtgcccgggacgctgcgcgcccccgggactccatttcccagagtgccccgccccagcctcccggccccgccccccacctggctccgcgggcagccggagcgcacccggccggaagccgctgtcggggagccggcggtggggctggacgcaggtgcaactgacatgggtgaaccccagggatccatgcggattctagtgacagggggctctgggctggtaggcaaagccatccagaaggtggtagcagatggagctggacttcctggagaggactgggtgtttgtctcctctaaagacgccgatctcacggatacagcacagacccgcgccctgtttgagaaggtccaacccacacacgtcatccatcttgctgcaatggtggggggcctgttccggaatatcaaatacaatttggacttctggaggaaaaacgtgcacatgaacgacaacgtcctgcactcggccttcgaggtgggcgcccgcaaggtggtgtcctgcctgtccacctgtatcttccctgacaagacgacctacccgatagatgagaccatgatccacaatgggcctccccacaacagcaattttgggtactcgtatgccaagaggatgatcgacgtgcagaacagggcctacttccagcagtacggctgcaccttcaccgctgtcatccccaccaacgtcttcgggccccacgacaacttcaacatcgaggatggccacgtgctgcctggcctcatccacaaggtgcacctggccaagagcagcggctcggccctgacggtgtggggtacagggaatccgcggaggcagttcatatactcgctggacctggcccagctctttatctgggtcctgcgggagtacaatgaagtggagcccatcatcctctccgtgggcgaggaagatgaggtctccatcaaggaggcagccgaggcggtggtggaggccatggacttccatggggaagtcacctttgatacaaccaagtcggatgggcagtttaagaagacagccagtaacagcaagctgaggacctacctgcccgacttccggttcacacccttcaagcaggcggtgaaggagacctgtgcttggttcactgacaactacgagcaggcccggaagtgaagctggaagacaggatcaggtgccagcggaccatcggctggcagagcccagcggccaccacccgtcaaccctgccaggagctgagggcaccacccagcaacctgggcctgcattccatccgctctgcagccccaagcatctttccagtggggcccccattcacgttggtcctcagggaaaccagggtccggggcaggcccggcgctttgctccccacaccagccccctgcgcgtgtccactctgatcctgcatcccactccctgggagccaataaagtgcattttcacaggcaaaaaaaaaaaaaaaaaaaaaaaaaaaaaaaaaaaaaaaaaaaaaaaaagggggggggcgccaaaagattccccctcggggggggccgccacaatattatgccgcagcagcccacggtgtttctgtgtgtgaaaaagaagggggggccccaataaaggggggcgcgtaatatatgaaccccgcacgagatgggcgcccggctttaaaaaaacgcggcggtggagtgggcgaaaaaacgcgtgataccggggcaaacctggggagaagagacacccccaaacacggagggggggagaccaatcgggggcaacacactacct

SEQ ID NO: 13 - DNA, 1869 bp, Homo sapien
gggagccgcgcgacgcctgcgcagggccccctcccctaagggctggccctggggccctgccgggggagcccgagcaggtttccggctcccaggatgggatccttgagggtggctgcgccccgaggcctgtcctgccctggaggaatctggctcgccagggctctccaggaccagccagcctcgagtgggcgtgggctgcacacaggcgccgtctcgtgcctgtccctagcatgcgggctttagctgcgaaccgtgttaacgacctgtgccaggagcccccgtcccaaggttgtctgcctcccctcttgtcagtcagaggggagtagaatgtaccttttctcggcctagtggggagtcgtgggttgggaccagctgctctgggctgggtggtagctcaggacccctgcggcgctgtaggctgagagctcccaggggaacagggctgcgacgagggagtgcctcggtccagctgggtctttctggttgccagtggactatgccccactctgagggcctcactctgtgccagttgccacagaagagtggggctccaaaggatgagagcgtgatgacctcagcctcccactgtttgacattacagtgcaactgacatgggtgaaccccagggatccatgcggattctagtgacagggggctctgggctggtaggcaaagccatccagaaggtggtagcagatggagctggacttcctggagaggactgggtgtttgtctcctctaaagacgccgatctcacggatacagcacagacccgcgccctgtttgagaaggtccaacccacacacgtcatccatcttgctgcaatggtggggggcctgttccggaatatcaaatacaatttggacttctggaggaaaaacgtgcacatgaacgacaacgtcctgcactcggccttcgaggtgggcgcccgcaaggtggtgtcctgcctgtccacctgtatcttccctgacaagacgacctacccgatagatgagaccatgatccacaatgggcctccccacaacagcaattttgggtactcgtatgccaagaggatgatcgacgtgcagaacagggcctacttccagcagtacggctgcaccttcaccgctgtcatccccaccaacgtcttcgggccccacgacaacttcaacatcgaggatggccacgtgctgcctggcctcatccacaaggtgcacctggccaagagcagcggctcggccctgacggtgtggggtacagggaatccgcggaggcagttcatatactcgctggacctggcccagctctttatctgggtcctgcgggagtacaatgaagtggagcccatcatcctctccgtgggcgaggaagatgaggtctccatcaaggaggcagccgaggcggtggtggaggccatggacttccatggggaagtcacctttgatacaaccaagtcggatgggcagtttaagaagacagccagtaacagcaagctgaggacctacctgcccgacttccggttcacacccttcaagcaggcggtgaaggagacctgtgcttggttcactgacaactacgagcaggcccggaagtgaagctggaagacaggatcaggtgccagcggaccatcggctggcagagcccagcggccaccacccgtcaaccctgccaggagctgagggcaccacccagcaacctgggcctgcattccatccgctctgcagccccaagcatctttccagtggggcccccattcacgttggtcctcagggaaaccagggtccggggcaggcccggcgctttgctccccacaccagccccctgcgcgtgtccactctgatcctgcatcccactccctgggagccaataaagtgcattttcacaggc

SEQ ID NO: 14 - DNA, 1602 bp, Homo sapien
gactccaagtcccagctgtgcccgggacgctgcgcgcccccgggactccatttcccagagtgccccgccccagcctcccggccccgccccccacctggctccgcgggcagccggagcgcacccggccggaagccgctgtcggggagccggcggtggggctggacgcaggtgcaactgacatgggtgaaccccagggatccatgcggattctagtgacagggggctctgggctggtaggcaaagccatccagaaggtggtagcagatggagctggacttcctggagaggactgggtgtttgtctcctctaaagacgccgatctcacggatacagcacagacccgcgccctgtttgagaaggtccaacccacacacgtcatccatcttgctgcaatggtggggggcctgttccggaatatcaaatacaatttggacttctggaggaaaaacgtgcacatgaacgacaacgtcctgcactcggccttcgaggtgggcgcccgcaaggtggtgtcctgcctgtccacctgtatcttccctgacaagacgacctacccgatagatgagaccatgatccacaatgggcctccccacaacagcaattttgggtactcgtatgccaagaggatgatcgacgtgcagaacaggtcctcgcgcccatcctgctgaggcccagccaggagtcggggagagggcccccaggggcgggtggggccggctggtcgggtcttcgtgccagcctcagtaagaggccagcggcagcctggggtgggatcgcgggcccaggacgagggcaggagacgctgtgcctcggcctacttccagcagtacggctgcaccttcaccgctgtcatccccaccaacgtcttcgggccccacgacaacttcaacatcgaggatggccacgtgctgcctggcctcatccacaaggtgcacctggccaagagcagcggctcggccctgacggtgtggggtacagggaatccgcggaggcagttcatatactcgctggacctggcccagctctttatctgggtcctgcgggagtacaatgaagtggagcccatcatcctctccgtgggcgaggaagatgaggtctccatcaaggaggcagccgaggcggtggtggaggccatggacttccatggggaagtcacctttgatacaaccaagtcggatgggcagtttaagaagacagccagtaacagcaagctgaggacctacctgcccgacttccggttcacacccttcaagcaggcggtgaaggagacctgtgcttggttcactgacaactacgagcaggcccggaagtgaagctggaagacaggatcaggtgccagcggaccatcggctggcagagcccagcggccaccacccgtcaaccctgccaggagctgagggcaccacccagcaacctgggcctgcattccatccgctctgcagccccaagcatctttccagtggggcccccattcacgttggtcctcagggaaaccagggtccggggcaggcccggcgctttgctccccacaccagccccctgcgcgtgtccactctgatcctgcatcccactccctgggagccaataaagtgcattttcacaggc

SEQ ID NO: 15 - DNA, 1693 bp, Homo sapien
gactccaagtcccagctgtgcccgggacgctgcgcgcccccgggactccatttcccagagtgccccgccccagcctcccggccccgccccccacctggctccgcgggcagccggagcgcacccggccggaagccgctgtcggggagccggcggtggggctggacgcaggtgcaactgacatgggtgaaccccagggatccatgcggattctagtgacagggggctctgggctggtaggcaaagccatccagaaggtggtagcagatggagctggacttcctggagaggactgggtgtttgtctcctctaaagacgccgatctcacggatacagcacagacccgcgccctgtttgagaaggtccaacccacacacgtcatccatcttgctgcaatggtggggggcctgttccggaatatcaaatacaatttggacttctggaggaaaaacgtgcacatgaacgacaacgtcctgcactcggccttcgaggtgggcgcccgcaaggtggtgtcctgcctgtccacctgtatcttccctgacaagacgacctacccgatagatgagaccatgatccacaatgggcctccccacaacagcaattttgggtactcgtatgccaagaggatgatcgacgtgcagaacaggtcctcgcgcccatcctgctgaggcccagccaggagtcggggagagggcccccaggggcgggtggggccggctggtcgggtcttcgtgccagcctcagtaagaggccagcggcagcctggggtgggatcgcgggcccaggacgagggcaggagacgctgtgcctcggcctacttccagcagtacggctgcaccttcaccgctgtcatccccaccaacgtcttcgggccccacgacaacttcaacatcgaggatggccacgtgctgcctggcctcatccacaaggtgcacctggccaagagtgagtgcgtccgtccgatggggtgcccgggctcagctcgggaggaggtgacccagtgcctctgacacctgctccttccccaaatctgcaggcagcggctcggccctgacggtgtggggtacagggaatccgcggaggcagttcatatactcgctggacctggcccagctctttatctgggtcctgcgggagtacaatgaagtggagcccatcatcctctccgtgggcgaggaagatgaggtctccatcaaggaggcagccgaggcggtggtggaggccatggacttccatggggaagtcacctttgatacaaccaagtcggatgggcagtttaagaagacagccagtaacagcaagctgaggacctacctgcccgacttccggttcacacccttcaagcaggcggtgaaggagacctgtgcttggttcactgacaactacgagcaggcccggaagtgaagctggaagacaggatcaggtgccagcggaccatcggctggcagagcccagcggccaccacccgtcaaccctgccaggagctgagggcaccacccagcaacctgggcctgcattccatccgctctgcagccccaagcatctttccagtggggcccccattcacgttggtcctcagggaaaccagggtccggggcaggcccggcgctttgctccccacaccagccccctgcgcgtgtccactctgatcctgcatcccactccctgggagccaataaagtgcattttcacaggc

SEQ ID NO: 16 - DNA, 2040 bp, Homo sapien
gactccaagtcccagctgtgcccgggacgctgcgcgcccccgggactccatttcccagagtgccccgccccagcctcccggccccgccccccacctggctccgcgggcagccggagcgcacccggccggaagccgctgtcggggagccggcggtggggctggacgcaggtgcaactgacatgggtgaaccccagggatccatgcggattctagtgacagggggctctgggctggtaggcaaagccatccagaaggtggtagcagatggagctggacttcctggagaggactgggtgtttgtctcctctaaagacgccgatctcacggatacagcacagacccgcgccctgtttgagaaggtccaacccacacacgtcatccatcttgctgcaatggtggggggcctgttccggaatatcaaatacaatttggacttctggaggaaaaacgtgcacatgaacgacaacgtcctgcactcggccttcgaggtgggcgcccgcaaggtggtgtcctgcctgtccacctgtatcttccctgacaagacgacctacccgatagatgagaccatgatccacaatgggcctccccacaacagcaattttgggtactcgtatgccaagaggatgatcgacgtgcagaacagggcctacttccagcagtacggctgcaccttcaccgctgtcatccccaccaacgtcttcgggccccacgacaacttcaacatcgaggatggccacgtgctgcctggcctcatccacaaggtgcacctggccaagagcagcggctcggccctgacggtgtggggtacagggaatccgcggaggcagttcatatactcgctggacctggcccagctctttatctgggtcctgcgggagtacaatgaagtggagcccatcatcctctccggtgggtacctcagccctcagcccccttcctccatggtaggacaggatccaaggctgtcctgggaggctggctgaggggtgggagcaggaatattcatgggccgtcgggtggcaccaaggggaggcctgacccggtggctccccacatgggcgaggaagatgaggtctccatcaaggaggcagccgaggcggtggtggaggccatggacttccatggggaagtcaccgtatcctctggctccagtgctgggggttgggcgggggccccttgggcgggctcagtggccacccggtgtagggccagcgtgggtgggacactgcggagggaggatgctcaccctggcaggcggaggagctctgctgtggctcccctgggaatggcagaggttcaagggcaagctgcgggggctggggtggaggtgctcttctcgctgtggccttgacaaagcctccatttgatacaaccaagtcggatgggcagtttaagaagacagccagtaacagcaagctgaggacctacctgcccgacttccggttcacacccttcaagcagggtgagccctgaccccacagccctccacttggtggaggcctgccccagcccctccctcatgctcgctaccagggcagaggtgaggtgccccctcagagcctgtactgccctggaggtgggacaccaaagctctgaggggtgacttccctgtccctgggcctcctccccccacttcctcccatgcggccccgaccctccctgtccatggccctcacctgcctgcctctgcagcggtgaaggagacctgtgcttggttcactgacaactacgagcaggcccggaagtgaagctggaagacaggatcaggtgccagcggaccatcggctggcagagcccagcggccaccacccgtcaaccctgccaggagctgagggcaccacccagcaacctgggcctgcattccatccgctctgcagccccaagcatctttccagtggggcccccattcacgttggtcctcagggaaaccagggtccggggcaggcccggcgctttgctccccacaccagccccctgcgcgtgtccactctgatcctgcatcccactccctgggagccaataaagtgcattttcacaggc

SEQ ID NO: 17 - DNA, 2481 bp, Homo sapien
cgcccagcgcagccccggccgctgggcgcacccgtcccgttcgtccccggacgttgctctctaccccgggaacgtcgagactggagcgcccgaactgagccaccttcgcggaccccgagagcggcggcgcgactcaccgcggaggcgcccggacgcgtcaagtgcgtactttcaaccgtaaatgggtgctgagcgtttaggggtgcggggcaactccctaactcgtggggccctggccggccctgccgcggcgtccgagaccttctgatccctcgctgcgcgcggcgcggggttggcgacttgggctcaggggcggcggggcggggaggtgccttgacctagggacccagaggccgggagcaagtctcctttcgccttggactgcagtgtcccccagggcaaggcctgaaccaggtcgcgagggtctgtctcccgtctggggagctgaactgcccgagacactgtcgcagtcgcggggacttgtctggagcggcggggtctgagcccaagtcggaagccgccgccgccgccagcgtcccgtgcgcctgccgccccgggaccagccgcgaaacttcttctcgggacggagacagcgctcgccgcccgggccgaggtaggagctggctgggctcggtagagcgcgggcgaatcgctttcggcagcgaaggaacgtgtcgggagaagccaactgcaggaccaggccccagcgggcgcgcagagacgcctgccttgggcggaggtccccccctccggttttcgtggctctggtagggccctctgtcccgtgagctcctcactggacctgaggctacaggcttcagcaggtcaagcgcccgagtgtgcctggaggattggcggcggggtggcatgagaaggtggcccctcttctccatctcccagtcaggcgatttctctgctgtctggggcaggggcgcacaccccaggaacttactacgtagagggaagccagcctggtctctcccccttgcgtcagtgctcctaagctgcccctcaccactctgggtaggggtctttcaggtgggctagggaattctccttggaagtccccttgtttgctcccctccatcagggcacctctgagttagccaatcatcctcttttctggcctcttttttgcggggaggagagtagagagagaagcctcctactcggcaggtctctgagaggaggtttgggggggcttctgaggttgctcctcctgggcagagtcaaggggtgttgagggttccaacttttactggacaatctctcaagctctgattccctgatttctgggaggtgtcagtgtagggcttgtgtcctgccccacccacacagcatttggtgcaggcacatgggatggttccccaagcccttttcccacagttagtttcagaaaatgcataagccacctaaggctgggagagcctttctgtgctggctgagatctggtggcatgtgcatgcatatgtgtgcaagtgtgtgtgtgtgtgtgcaagtgtgtgtgcgcatgtgcatgtgtgtggaaagtatggtctgggtggctgtaagactggcccctcttgtcccctctgcaggcccagcccaataggaagcacctgatccacactctttctagccccagggatgctcaggaaagcagcctttctttagggctgtcatctgttctggggatctgttgctgtttcttgggcccacagaatacactccacacctcgggactccataatattggacaaggctggaaggcccatttggctcctgcagcctcttatgcaggtgaggacagacccaaggtccaggcaatgctggcctttggaacacagaacctggctcactgactcccactccagttgtcttttccctctgcctctggagcaaccctctctcctccagagcaacccctgtccctccttcctacctctctctagggctgcacccccagctcaccttagacctggcccttcctacctgttgcccctactgtcttgtcccatcccagtggtcaggagggagagtactggccaaaggcccagctccacctgtgacttaggggagtgccaggcatcacccagaggtcccggccctcgggggcctggcaggctctgctgtgggggaagcagagttagaactggggctgcttctccactggccgtttgtctctgtcccctccactggcctcttgaagcacagagaccctccgggtactttccttcctctgggcttccactcatgctattccctgctccctttttctacctggagacccccattcctagtcatcctcttcagcggtcctcccagagctgtcctcagcatggcagcctccacagcccctgggtgtcacccccggtttcgtgtctgcctcggactccagacctgcccctcccaggctggcccagatggatcctctacagtgactaacccaaaccagcaccaggcagggacccaataaacctttgtgaatggaaaaaaaaaaaa

SEQ ID NO: 18 - DNA, 2127 bp, Homo sapien
aaagggttcgccgatcttggggagccacacagcccgggtcgcaggcacctccccgccagctctcccgcttctcgcacagcttcccgacgcgtctgctgagccccatggcccacgccacgctctccgccgcccccagcaatccccggctcctgcgggtggcgctgctgctcctgctcctggtggccgccagccggcgcgcagcaggtgggtcccggcgccctggggtccccgggccggacgcggctggggtgggcgccccgcgccgacagccccgctcaatcagcgagtctattcttccctaggagcgtccgtggtcactgaactgcgctgccagtgcttgcagacactgcagggaattcacctcaagaacatccaaagtgtgaatgtaaggtcccccggaccccactgcgcccaaaccgaagtcatgtaagtcccgccccgcgcttccgctgccaccgctggggtccccgactctcccgctgccccaaccctgtccccagcccgacctcctgtctcacggaattcccttctctctgcagagccacactcaagaatgggaagaaagcttgtctcaaccccgcatcccccatggttcagaaaatcatcgaaaagatactgaacaagtgagttgtaatttccatatacacaggcgactggagccgttggtcagaaatactggcatctgccccctaaaaataaaatcagggaaccccaagagttagctgaaggactagaaattgtgattattattttcacaattaaagttgccattaaggttattaatctgctctggtgccagaggatatttcagtatttcagtgtcttccatttccaggcctaacccctgggagggtaaatgtgggtttctagaatactaagtaaatttgactaacaatgccaaaatgccccctgcctgttttgggacgtttacctcagtccctaatgggcttcagacctgaaaaatgcaatgtctggtttgggcactttgggcctgtaagccttcttggtgaagagcagaaactttgcagtaacaccttcagtgagttcaaggctaggatccctgtcaacattatttaatctctttgagctttagcaaaatagggtagataatggtagttatttcatagggttgtgtgcagcttaagggagatcatgaatggacatttctaacccaatgtgacaatcagtgaccaatatgttttggctttttcaaaccaagaatctagttgagtccacagccacttctttcttgaaaaaaaaaaaaaaaagcattcaggagtgcaagttttctgctatagaaggcagtgggtacagacagaccttccctgagtggagggctgggagagagtctgcatggggacatccctccaagcaacttcagagtgacagaagagcagccttccttagcacctgcaacagtaacccttttctcatcacagggggagcaccaactgacaggagagaagtaagaagcttatcagcgtatcattgacacttcctgcagggtggtccctgcccttaccagagctgaaaatgaaaaagagaacagcagctttctagggacagctggaaaggacttaatgtgtttgactatttcttacgagggttctacttatttatgtatttatttttgaaagcttgtattttaatattttacatgctgttatttaaagatgtgagtgtgtttcatcaaacatagctcagtcctgattatttaattggaatatgatgggttttaaatgtgtcattaaactaatatttagtgggagaccataatgtgtcagccaccttgataaatgacagggtggggaactggagggtggggggattgaaatgcaagcaattagtggatcactgttagggtaagggaatgtatgtacacatctattttttatactttttttttaaaaaaagaatgtcagttgttatttattcaaattatctcacattatgtgttcaacatttttatgctgaagtttcccttagacattttatgtcttgcttgtagggcataatgccttgtttaatgtccattctgcagcgtttctctttcccttggaaaagagaatttatcattactgttacatttgtacaaatgacatgataataaaagttttatgaaaaaaa

SEQ ID NO: 19 - DNA, 4323 bp, Homo sapien
gggacgtccgtggtccttgtcgcacgtcgcagcgcctggcgcccgggaagaggtggttgtgaggcagacgaactcgcggctctccggcttccgaggcttccgagttgtcggaggaagggggcggcgagcaataagaacccgccgcacccggtcctcagcgactcttctgacctccgcgcgacgtacccgccgccgccgttggctggagcatttgacattgtgcagcaaagaaatggttatggagaagcccagtccgctgcttgtagggcgggagtttgtgaggcaatattatactttgctgaataaagctccggaatatttacacaggttttatggcaggaattcttcctatgttcatggtggagtagatgctagtggaaagccccaggaagctgtttatggccaaaatgatatacaccacaaagtattatctctgaacttcagtgaatgtcatactaaaattcgtcatgtggatgctcatgcaaccttgagtgatggagtagttgtccaggtcatgggtttgctgtctaacagtggacaaccagaaagaaagtttatgcaaacctttgttctggctcctgaaggatctgttccaaataaattttatgttcacaatgatatgtttcgttatgaagatgaagtgttatggtgattctgagcctgaacttgatgaagaatcagaagatgaagtagaagaggaacaagaagaaagacaaccatctcctgaacctgtgcaagaaaatgctaacagtggttactatgaagctcaccctgtgactaatggcatagaggagcctttggaagaatcctctcatgaacctgaacctgagccagaatctgaaacaaagactgaagagctgaaaccacaagtggaggagaagaacttagaagaactagaggagaaatctactactcctcctccggcagaacctgtttctctgccacaagaaccaccaaaggctttctcctgggcttcagtgaccagtaaaaacctgcctcctagtggtactgtttcttcctctggaattccaccccatgttaaagcaccagtctcacagccaagagtcgaagctaaaccagaagttcaatctcagccacctcgtgtgcgtgaacaacgacctagagaacgacctggttttcctcctagaggaccaagaccaggcagaggagatatggaacagaatgactctgacaaccgtagaataattcgctatccagatagtcatcaactttttgttggtaacttgccacatgatattgatgaaaatgagctaaaggaattcttcatgagttttggaaacgttgtggaacttcgcatcaataccaagggtgttgggggaaagcttccaaattttggttttgtggtttttgatgactctgaaccagttcagagaatcttaattgcaaaaccgattatgtttcgaggggaagtacgtttaaatgtggaagagaaaaaaacaagagctgcaagagagcgagaaaccagaggtggtggtgatgatcgcagggatattaggcgcaatgatcgaggtcccggtggtccacgtggaattgtgggtggtggaatgatgcgtgatcgtgatggaagaggacctcctccaaggggtggcatggcacagaaacttggctctggaagaggaaccgggcaaatggagggccgcttcacaggacagcgtcgctgaagctccactgttggcaaagtcttggcagtggtacattattcatcgtgtttgcattcttgttaattttttttttggctttggaatgtgacacagcctttttgatcatttctttgatgtgaaaagcatctttggttatcagttaaattgaggtggacattatttccccaatttcacaacaggattcacattgttaatttataaatctagacttggagaattaaggactgagaaatgaccatatcttaaactatctacgacaaagtgaacttaaaaggacatgcccactgaattcaggtcctttgagtaaaaaaaaaatcttctgctgcacattttgtttaagtgttactgtttctgcctgttaatgctgggaacacaaatagtgcaatttgtgcaattggagaatcttgccttttttcttggctccccccaaaaatacaaaccaacagaaacttgttatgcactcatcaaaatgtactaatgggtactctgaactcattaacattgacatctgcaacaggaggcaacagggaaaaaatctcatcttcttttccagtagaaaatagtttgtgaaatgatgagggcattttatctgcttgctgtgaccagcgtgtgtacacataaaccttaacaagactacaagtatattccagaaggaaatcattttagttatgaactaaataataaaaattagaacttcaaatgcgatggtcttgactattagaccagatttagtagctccatatctaagatttttctacctgcccctcttcagtacagggatggctggctgctcaacacactcctcctccccttttttcctttctttaagctgtgtacagtgaaaattgtctttactgtatttttgttctctggtaatgtaataagcatgatggtgccttctattaatacatcattccagtcttgctggtaattttgtacagtatagtgtatgaattgctgtgctgcaaagccaaacagctgcaaaatgttgaaaaatcatcgaaatgtataaaaattgcagtatctttaaaatcagtaaaatggactagcatattatttatcttgttcttcagttaacaactttgtgttctctgtgggagggagggagtcctgtgtgtttgtggggagagggaaggaggaagtcagttatttgagtaagcctctagttgacttttctcttagcctgaatgtggacgttgaaacatatcacttcagggcttggaaaagtcagtcaacttgacgtacatttttagtgacattttaaaagcagtcagattctataaatggcaagtaagcctgaagtgaggatactgcaattttcggagaaaagaacagcagctctttaagtgtttgcattttctatttggggggcagggaactgtcattcattttgcacaattcttgaactgatgtcagcacccgagtggctcctgaatttaagtctgggacgacatcttttatttttacatgaatctttaaacaattctgtgagcaaagtttgtagctgctggattattgtctgtctttatagcaagttccagtaaaccacaagtatggcaaagcttatccaattttatgcttggagcagtcagtacataccagtttctgatgtttcaggcaggagtggggtaaataagtgtgaccacttaaagctgctcgttagcatggaagacttctccattctatctttgtaaaacagacaagatatgcacttgacatagtagcaaattggttctgaattatgcaactgtttgctatttagtaaactagcaaatgatgcatgtattttgtttttcatgtactgggcaatatgagtaaaatctgtccctttttccccctttgaatgaggtcttccatgtttgagggaaagtcttgcactattgcatatattttggggacacagattttcatagtttccatttttggggggcttaaggattttttttttttctgtttgaaacagttttatactttctgatatagtacttgaaattcttaccagaaaattactttggagttttgaagcctttattaatactacttttaaagaagcagttgttttattgtcaatgttttttttcccccaagcatattttcttgtatttctgtttccatatatatatatatatataatttccaattcaggatattgccctgccatccatgaaaactgttctggcaccaaaagtaatgacaaatgttaagtgtaataatagaaaagtagagcaaagagccattcagcttcagtctttacataccatgaataaaacattaaaacatcatatggagaagtttacatggtgattgttcacctgcagtactgtggagttttaacattttgtcctcttttcagtgaaacagagtaaaaatattcatctaccattactgttatttgctgattttgttttattttttgatggtaatattctatccttatgacactattgcaaccaaattggctttaccatcttggctttagtaggtatagaagacaatggattaccatctttattgctgtaatgtgttaagcattatatgctagtagaatctagtttaattgtttcaggtggaaagtattctttgagtttccatattgaatgtgtttggactaaacaaacaataaactactgatgtctgcagc

SEQ ID NO: 20 - DNA, 3590 bp, Homo sapien
gactgggaggmamagagagtcagcttctgctggcttcccaatcagaagatgaagtagaagaggaacaagaagaaagacaaccatctcctgaacctgtgcaagaaaatgctaacagtggttactatgaagctcaccctgtgactaatggcatagaggagcctttggaagaatcctctcatgaacctgaacctgagccagaatctgaaacaaagactgaagagctgaaaccacaagtggaggagaagaacttagaagaactagaggagaaatctactactcctcctccggcagaacctgtttctctgccacaagaaccaccaaagccaagagtcgaagctaaaccagaagttcaatctcagccacctcgtgtgcgtgaacaacgacctagagaacgacctggttttcctcctagaggaccaagaccaggcagaggagatatggaacagaatgactctgacaaccgtagaataattcgctatccagatagtcatcaactttttgttggtaacttgccacatgatattgatgaaaatgagctaaaggaattcttcatgagttttggaaacgttgtggaacttcgcatcaataccaagggtgttgggggaaagcttccaaattttggttttgtggtttttgatgactctgaaccagttcagagaatcttaattgcaaaaccgattatgtttcgaggggaagtacgtttaaatgtggaagagaaaaaaacaagagctgcaagagagcgagaaaccagaggtggtggtgatgatcgcagggatattaggcgcaatgatcgaggtcccggtggtccacgtggaattgtgggtggtggaatgatgcgtgatcgtgatggaagaggacctcctccaaggggtggcatggcacagaaacttggctctggaagaggaaccgggcaaatggagggccgcttcacaggacagcgtcgctgaagctccactgttggcaaagtcttggcagtggtacattattcatcgtgtttgcattcttgttaattttttttttggctttggaatgtgacacagcctttttgatcatttctttgatgtgaaaagcatctttggttatcagttaaattgaggtggacattatttccccaatttcacaacaggattcacattgttaatttataaatctagacttggagaattaaggactgagaaatgaccatatcttaaactatctacgacaaagtgaacttaaaaggacatgcccactgaattcaggtcctttgagtaaaaaaaaaatcttctgctgcacattttgtttaagtgttactgtttctgcctgttaatgctgggaacacaaatagtgcaatttgtgcaattggagaatcttgccttttttcttggctccccccaaaaatacaaaccaacagaaacttgttatgcactcatcaaaatgtactaatgggtactctgaactcattaacattgacatctgcaacaggaggcaacagggaaaaaatctcatcttcttttccagtagaaaatagtttgtgaaatgatgagggcattttatctgcttgctgtgaccagcgtgtgtacacataaaccttaacaagactacaagtatattccagaaggaaatcattttagttatgaactaaataataaaaattagaacttcaaatgcgatggtcttgactattagaccagatttagtagctccatatctaagatttttctacctgcccctcttcagtacagggatggctggctgctcaacacactcctcctccccttttttcctttctttaagctgtgtacagtgaaaattgtctttactgtatttttgttctctggtaatgtaataagcatgatggtgccttctattaatacatcattccagtcttgctggtaattttgtacagtatagtgtatgaattgctgtgctgcaaagccaaacagctgcaaaatgttgaaaaatcatcgaaatgtataaaaattgcagtatctttaaaatcagtaaaatggactagcatattatttatcttgttcttcagttaacaactttgtgttctctgtgggagggagggagtcctgtgtgtttgtggggagagggaaggaggaagtcagttatttgagtaagcctctagttgacttttctcttagcctgaatgtggacgttgaaacatatcacttcagggcttggaaaagtcagtcaacttgacgtacatttttagtgacattttaaaagcagtcagattctataaatggcaagtaagcctgaagtgaggatactgcaattttcggagaaaagaacagcagctctttaagtgtttgcattttctatttggggggcagggaactgtcattcattttgcacaattcttgaactgatgtcagcacccgagtggctcctgaatttaagtctgggacgacatcttttatttttacatgaatctttaaacaattctgtgagcaaagtttgtagctgctggattattgtctgtctttatagcaagttccagtaaaccacaagtatggcaaagcttatccaattttatgcttggagcagtcagtacataccagtttctgatgtttcaggcaggagtggggtaaataagtgtgaccacttaaagctgctcgttagcatggaagacttctccattctatctttgtaaaacagacaagatatgcacttgacatagtagcaaattggttctgaattatgcaactgtttgctatttagtaaactagcaaatgatgcatgtattttgtttttcatgtactgggcaatatgagtaaaatctgtccctttttccccctttgaatgaggtcttccatgtttgagggaaagtcttgcactattgcatatattttggggacacagattttcatagtttccatttttggggggcttaaggattttttttttttctgtttgaaacagttttatactttctgatatagtacttgaaattcttaccagaaaattactttggagttttgaagcctttattaatactacttttaaagaagcagttgttttattgtcaatgttttttttcccccaagcatattttcttgtatttctgtttccatatatatatatatatataaatttccaattcaggatattgccctgccatccatgaaaactgttctggcaccaaaagtaatgacaaatgttaagtgtaataatagaaaagtagagcaaagagccattcagcttcagtctttacataccatgaataaaacattaaaacatcatatggagaagtttacatggtgattgttcacctgcagtactgtggagttttaacattttgtcctcttttcagtgaaacagagtaaaaatattcatctaccattactgttatttgctgattttgttttattttttgatggtaatattctatccttatgacactattgcaaccaaattggctttaccatcttggctttagtaggtatagaagacaatggattaccatctttattgctgtaatgtgttaagcattatatgctagtagaatctagtttaattgtttcaggtggaaagtattctttgagtttccatattgaatgtgtttggactaaacaaacaataaactactgatgtctgcagca

SEQ ID NO: 21 - DNA, 3200 bp, Homo sapien
aggctgtctagaggatccctcgggccaccaagacaggcagaggagatatggaacagaatgactctgacaaccgtagaataattcgctatccagatagtcatcaactttttgttggtaacttgccacatgatattgatgaaaatgagctaaaggaattcttcatgagttttggaaacgttgtggaacttcgcatcaataccaagggtgttgggggaaagcttccaaattttggttttgtggtttttgatgactctgaaccagttcagagaatcttaattgcaaaaccgattatgtttcgaggggaagtacgtttaaatgtggaagagaaaaaaacaagagctgcaagagagcgagaaaccagaggtggtggtgatgatcgcagggatattaggcgcaatgatcgaggtcccggtggtccacgtggaattgtgggtggtggaatgatgcgtgatcgtgatggaagaggacctcctccaaggggtggcatggcacagaaacttggctctggaagaggaaccgggcaaatggagggccgcttcacaggacagcgtcgctgaagctccactgttggcaaagtcttggcagtggtacattattcatcgtgtttgcattcttgttaattttttttttggctttggaatgtgacacagcctttttgatcatttctttgatgtgaaaagcatctttggttatcagttaaattgaggtggacattatttccccaatttcacaacaggattcacattgttaatttataaatctagacttggagaattaaggactgagaaatgaccatatcttaaactatctacgacaaagtgaacttaaaaggacatgcccactgaattcaggtcctttgagtaaaaaaaaaatcttctgctgcacattttgtttaagtgttactgtttctgcctgttaatgctgggaacacaaatagtgcaatttgtgcaattggagaatcttgccttttttcttggctccccccaaaaatacaaaccaacagaaacttgttatgcactcatcaaaatgtactaatgggtactctgaactcattaacattgacatctgcaacaggaggcaacagggaaaaaatctcatcttcttttccagtagaaaatagtttgtgaaatgatgagggcattttatctgcttgctgtgaccagcgtgtgtacacataaaccttaacaagactacaagtatattccagaaggaaatcattttagttatgaactaaataataaaaattagaacttcaaatgcgatggtcttgactattagaccagatttagtagctccatatctaagatttttctacctgcccctcttcagtacagggatggctggctgctcaacacactcctcctccccttttttcctttctttaagctgtgtacagtgaaaattgtctttactgtatttttgttctctggtaatgtaataagcatgatggtgccttctattaatacatcattccagtcttgctggtaattttgtacagtatagtgtatgaattgctgtgctgcaaagccaaacagctgcaaaatgttgaaaaatcatcgaaatgtataaaaattgcagtatctttaaaatcagtaaaatggactagcatattatttatcttgttcttcagttaacaactttgtgttctctgtgggagggagggagtcctgtgtgtttgtggggagagggaaggaggaagtcagttatttgagtaagcctctagttgacttttctcttagcctgaatgtggacgttgaaacatatcacttcagggcttggaaaagtcagtcaacttgacgtacatttttagtgacattttaaaagcagtcagattctataaatggcaagtaagcctgaagtgaggatactgcaattttcggagaaaagaacagcagctctttaagtgtttgcattttctatttggggggcagggaactgtcattcattttgcacaattcttgaactgatgtcagcacccgagtggctcctgaatttaagtctgggacgacatcttttatttttacatgaatctttaaacaattctgtgagcaaagtttgtagctgctggattattgtctgtctttatagcaagttccagtaaaccacaagtatggcaaagcttatccaattttatgcttggagcagtcagtacataccagtttctgatgtttcaggcaggagtggggtaaataagtgtgaccacttaaagctgctcgttagcatggaagacttctccattctatctttgtaaaacagacaagatatgcacttgacatagtagcaaattggttctgaattatgcaactgtttgctatttagtaaactagcaaatgatgcatgtattttgtttttcatgtactgggcaatatgagtaaaatctgtccctttttccccctttgaatgaggtcttccatgtttgagggaaagtcttgcactattgcatatattttggggacacagattttcatagtttccatttttggggggcttaaggattttttttttttctgtttgaaacagttttatactttctgatatagtacttgaaattcttaccagaaaattactttggagttttgaagcctttattaatactacttttaaagaagcagttgttttattgtcaatgttttttttcccccaagcatattttcttgtatttctgtttccatatatatatatatatataaatttccaattcaggatattgccctgccatccatgaaaactgttctggcaccaaaagtaatgacaaatgttaagtgtaataatagaaaagtagagcaaagagccattcagcttcagtctttacataccatgaataaaacattaaaacatcatatggagaagtttacatggtgattgttcacctgcagtactgtggagttttaacattttgtcctcttttcagtgaaacagagtaaaaatattcatctaccattactgttatttgctgattttgttttattttttgatggtaatattctatccttatgacactattgcaaccaaattggctttaccatcttggctttagtaggtatagaagacaatggattaccatctttattgctgtaatgtgttaagcattatatgctagtagaatctagtttaattgtttcaggtggaaagtattctttgagtttccatattgaatgtgtttggactaaacaaacaataaactactgatgtctgcagca

SEQ ID NO: 22 - DNA, 627 bp, Homo sapien
ggtggctcccgagtaggctcagagcgaccgtggccgggcggaagcggctttctggcctaagctttaacaggcttcgcctgtgcttcctgtttcctcttttaccaaggacccgccaacatgggccgcgttcgcaccaaaaccgtgaagaaggcggcccgggtcatcatagaaaagtactacacgcgcctgggcaacgacttccacacgaacaagcgcgtgtgcgaggagatcgccattatccccagcaaaaagctccgcaacaagatagcaggttacgtcacgcatctgatgaagcgaattcagagaggcccagtaagaggtatctccatcaagctgcaggaggaggagagagaaaggagagacaattatgttcctgaggtctcagccttggatcaggagattattgaagtagatcctgacactaaggaaatgctgaagcttttggasttcggcagtctgtscaaccttcaggtcattcatcccaactgtaggctgagtgacctgaaggttggacagactgcagttgggatgaatttcaaaacgcctcggggacctgtttgaattttttctgtagtgctgtattattttcaataaatctgggacaacagcaaaaaaaaaaaaaaaaaa

SEQ ID NO: 23 - DNA, 3187 bp, Homo sapien
ttgctcgagcggccggcgccagtgtgctggaaaggcgcgggcttcgttcgtaaggaagggggcctaggcccgggcctgcggtggtgggggttgctgcgcgccgggggtcgctcctgctgtgtcttccgctccagcttcgcccacttccccttgccagcggggtgggcgcggagaagacctgccggagccatggaggacgaagtggtccgctttgccaagaagatggacaagatggtgcagaagaagaaggtgagcgcggcgagcggcgcgggccgggagggaggccgggccgcggtccggcccgagggggccgtcccctccctccttctccctcccctccccctgcagcctcccgtctgggagccgggcccgccgcgcccgcgtccccggggagggtgtccgggcccggggcgtcgggtcccgcggcaacctgcgttaggacccgctcgctcttgtatttccagtccctgctcgctggtgccgtgtaataaacctaatcgatttagggattagggcacgctctccgttgactttaaactttcgtgctagtaaaaccttggcatttagcttaggaattgmagcgtagaaagtcctcagaacttgaaagaatggagtcttccgtgatccgtggccaacatctagaaagagcatcaaatagaggcttgtgatcggtattagacatcgggctggtaaaatgtaaaacttctgtgtcttatttttgaagagggctgaacgtccgcctggttatctcaactgtgctacatgtttgcttagcgattaaaaacgcggctggagcattggatttgctaaaggagcttaagaatattcctatgaccctggaattactgcagtccacaagaatcggaatgtcagttaatgctattcgcaagcagagtacagatgaggaagttacatctttggcaaagtctctcatcaaatcctggaaaaaattattagatgggccatcaactgagaaagaccttgacgaaaagaagaaagaacctgcaattacatcgcagaacagccctgaggcaagagaagaaagtacttccagcggcaatgtaagcaacagaaaggatgagacaaatgctcgagatacttatgtttcatcctttcctcgggcaccaagcacttctgattctgtgcggttgaagtgtagggagatgcttgctgcagctcttcgaacaggggatgactacattgcaattggagctgatgaggaagaattaggatctcaaattgaagaagctatatatcaagaaataaggaatacagacatgaaatacaaaaatagagtacgaagtaggatatcaaatcttaaagatgcaaaaaatccaaatttaaggaaaaatgtcctctgtgggaatattcctcctgacttatttgctagaatgacagcagaggaaatggctagtgatgagctgaaagagatgcggaaaaacttgaccaaagaagccatcagagagcatcagatggccaagactggtgggacccagactgacttgttcacatgtggcaaatgtaaaaagaagaattgcacttacacacaggtacaaacccgtagtgctgatgaaccaatgacaacatttgttgtctgtaatgaatgtggaaatcgatggaagttctgttgagttggaagaattggcaaaatatctggaccattaagaaaacggattttgtaactagctttaaactaggccaagcaactagttttcctgcaaatcaaatttttaaagcaacttgggttagactttgtttttgacctaacatcccttccttaaatgccttctgtagtttcagatcagtagggagaccatataataattttatggtacctgtttcaaaacatattttttctgtttttataagtaagttgatattaattaaactcttggcaatatttcttctttcttaaaggaaaatataccttaactttttttcttttacactgtgaaacatacacagtagaaattctgttactctctgttattaatacataaatgaaaatacatttttttccatattggcatgtagctacaaatattaaaggaggagaaaaggtaatataattttaggtttaccaaatatggtgtgtattcaaataatacttgaccagcttatctaaaatgtacataattttgaggtagcttatgaatttgattttaattattatgttcacaagcttggaatattagatattattttgcatctgtaactaaccgtgatcatcatttcttgtaatttcttgtacatgtatattacttgttcttaatagatttttggaaacaagactttattgagatcagtttggttttcctgttaatttacctgtttgactttataatgtgttttagttttgcagaagaacactgttgtagtttagaaggcttttcataaatcccctcataggcaaagatgaaaacttcccactatttttttcccctcttaggaagacatactggaaagaaaatgtttagcatcttagtgtagtatagctattgtaaacagttcatgactagattttgattcggaaatctatactgaccaaggattaatcttaaggattgtataattcattaaagctgtggtctttccatgtggagactgatagaaaataattttgtcccaagtcttatttgctgactttttctgtcatgagtgagattgttgaacaaactgaatatatgggctatagcaagtagctttacagtacagatcttacaattaagttttgcttttgttaaagtgtgtaccattttttctgtttggagtaagacaaaaattgttttgacataggttccctagggtacacttgctctagcatactttaaaggccactgttgcaaagtctacattttatgctgaatctgcattctgtcaggcacccgtagaaagacctcagtacatgctttgcactctcctttgctccctttttccaatttcttattgcatatcattttgttgtaatacagaaagcagcatttttaaatgtccgtgttaagaattggcccactggtaccaactcacctctattttgtcagttcatagttgaagattttgttttatttcaaaaacaaagtacatttttgaaataatgtttcagaataaaataatctcacttttaagtgatccattttaaaatttgtaattcaataaagttttttttgttgttaaacataaaaaaaaa

SEQ ID NO: 24 - DNA, 2990 bp, Homo sapien
cccggcattccgtgctccttggttccggcgttggagctctttggggcccagctttgcggacccgggagctcgggacgcaggcggggcttgtgctccgcgggggcagggcgtagggtgggcctcctacctcccctgatctcgcggtttgttccgtttcattggagcttcccggaccgtgtgctcgacggtgccctaggtgccgtggggccacacgcgagtctgataagcaccctcccccggaatcatgcggtgctgtgaggcctagcgaagatgaagatagaatgcaaggtagaaagtgctggatacctttagaaagctgcaggactggtgcgatgggagttgagacgtaagaacctgcccgtccgtagggctctggatgctgctgaggcccgaggcccctatggcagatttgaaaattcacccttgtagagtcattcctgcctttgagcggactcccttttaagagatctcaagagagcgttcggtggaggccctgggtctgcacagctcacctccctgggaactgctcgcccgagcgtcggagccggcgctggccccctgcagccggaaggttgcagccgcaggagccccggaggcccaggacacagggctcttgctcttgcagaatccacaggtctttcttgaggaaatctgtagacagaactttgtgctgcgtttttatctagggaaggaacagaagagtgtcgtctcctagaaatctagcactggagaaacgaggaaaattcttccagcgatggtctcccactcagagctgaggaagcttttctactcagcagatgctgtgtgttttgatgttgacagcacggtcatcagagaagaaggaatcgatgagctagccaaaatctgtggcgttgaggacgcggtgtcagaaatgacacggcgagccatgggcggggcagtgcctttcaaagctgctctcacagagcgcttagccctcatccagccctccagggagcaggtgcagagactcatagcagagcaacccccacacctgacccccggcataagggagctggtaagtcgcctacaggagcgaaatgttcaggttttcctaatatctggtggctttaggagtattgtagagcatgttgcttcaaagctcaatatcccagcaaccaatgtatttgccaataggctgaaattctactttaacggtgaatatgcaggttttgatgagacgcagccaacagctgaatctggtggaaaaggaaaagtgattaaacttttaaaggaaaaatttcattttaagaaaataatcatgattggagatggtgccacagatatggaagcctgtcctcctgctgatgctttcattggatttggaggaaatgtgatcaggcaacaagtcaaggataacgccaaatggtatatcactgattttgtagagctgctgggagaactggaagaataacatccattgtcgtacagctccaaacaacttcagatgaatttttacaagttatacagattgatactgtttgcttacagttgcctattacaacttgctatagaaagttggtacaaatgatctgtactttaaactacagttaggaatcctagaagattgctttttttttttttttaactgtagttccagtattatatgatgactattgatttcctggagaggttttttttttttttgagacagaatcttgctctgttgcccaggctggagtgcagtggcgcggtctcggctcactgcaagctctgcctcccaggttcacgccattctcctgcctcagcctcccgagtagctgggactacaggcgcccgccaccacatccggctaattttttgtatttttagtagagacggggtttgaccgtgttagccaggatggtcttgatctcctgaccttgtgatccgcctgcctcagcctcccaaagtgctgggattacaggcttgggccaccgcgcccagccaatgtcctagagagttttgtgatctgaattctttatgtatatttgtagctatatttcatacaaagtgctttaagtgtggagagtcaattaaacacctttactcttagaaatacggattcggcagccttcagtgaatattggtttctctttggtatgtcaataaaagtttatccgtatgtcagaacggatttgtggaattttcagttctgcctcttgcatattggaatacccaatatttcaggtaccgtgttgaagcataaatagcccccaggcaagaaacaggcttaagactctactttgcttagtgctgggtacaatgtcctcaccccatgagcccactcccacttcctgaagccctgggacctggaaagtccttttttttacttcttgggatttgtcatatatgaaatgttacaaaagttttttgttttttgttttcctccaatataacaatagagtcttaaacaaaagtactgattaaaaatggatatttgggctcaggcctgtaatctcagcactgtgggaggacaagttaagaggatcacttgaggacaggaattcgagaccagcctggacaacagagcaagaccctgtctctgcaaaaaataaaaacattagctggatgtggcggcacgcacctgtagtcccagctacttggtgggctgagatgggaggatcccttgaactcagtagttcaaggctgcagtgagctgtgactctgccattgtactccagcctgggtgacagtgagaccccgtctcttaaaaaaaaaaaaaaaaaaaaagatttttgcaaaatcccttaaagttaaaagaattaaaaacaggttttactaattcacaagggccagcattttcccctaaatgaattaaattttaataactcctaagaggctattataaaccatttcttttttataaatgccttggaaatactccgaaagccaggtttatgtttgttttgagcagagccaagcaagggaaatttcagaacatgctttgaatgtgtgagatgctataccctccctggaggaaaaatgggggg

SEQ ID NO: 25 - DNA, 3153 bp, Homo sapien
cccggcattccgtgctccttggttccggcgttggagctctttggggcccagctttgcggacccgggagctcgggacgcaggcggggcttgtgctccgcgggggcagggcgtagggtgggcctcctacctcccctgatctcgcggtttgttccgtttcattggagcttcccggaccgtgtgctcgacggtgccctaggtgccgtggggccacacgcgagtctgataagcaccctcccccggaatcatgcggtgctgtgaggcctagcgaagatgaagatagaatgcaaggtagaaagtgctggatacctttagaaagctgcaggactggtgcgatgggagttgagacgtaagaacctgcccgtccgtagggctctggatgctgctgaggcccgaggcccctatggcagatttgaaaattcacccttgtagagtcattcctgcctttgagcggactcccttttaagtttacagaagcacttgcagaactcatcagaagccaccccgcttatcagcagatctcaagagagcgttcggtggaggccctgggtctgcacagctcacctccctgggaactgctcgcccgagcgtcggagccggcgctggccccctgcagccggaaggttgcagccgcaggagccccggaggcccaggacacaggacagagtctcgttctgtcgcccaggctggagtgcagtggtgtgatctcggctcacttcaacctccgcctacagggttcaagggattctcctgcctcagcctcctgagtatctgggctcttgctcttgcagaatccacaggtctttcttgaggaaatctgtagacagaactttgtgctgcgtttttatctagggaaggaacagaagagtgtcgtctcctagaaatctagcactggagaaacgaggaaaattcttccagcgatggtctcccactcagagctgaggaagcttttctactcagcagatgctgtgtgttttgatgttgacagcacggtcatcagagaagaaggaatcgatgagctagccaaaatctgtggcgttgaggacgcggtgtcagaaatgacacggcgagccatgggcggggcagtgcctttcaaagctgctctcacagagcgcttagccctcatccagccctccagggagcaggtgcagagactcatagcagagcaacccccacacctgacccccggcataagggagctggtaagtcgcctacaggagcgaaatgttcaggttttcctaatatctggtggctttaggagtattgtagagcatgttgcttcaaagctcaatatcccagcaaccaatgtatttgccaataggctgaaattctactttaacggtgaatatgcaggttttgatgagacgcagccaacagctgaatctggtggaaaaggaaaagtgattaaacttttaaaggaaaaatttcattttaagaaaataatcatgattggagatggtgccacagatatggaagcctgtcctcctgctgatgctttcattggatttggaggaaatgtgatcaggcaacaagtcaaggataacgccaaatggtatatcactgattttgtagagctgctgggagaactggaagaataacatccattgtcgtacagctccaaacaacttcagatgaatttttacaagttatacagattgatactgtttgcttacagttgcctattacaacttgctatagaaagttggtacaaatgatctgtactttaaactacagttaggaatcctagaagattgctttttttttttttttaactgtagttccagtattatatgatgactattgatttcctggagaggttttttttttttttgagacagaatcttgctctgttgcccaggctggagtgcagtggcgcggtctcggctcactgcaagctctgcctcccaggttcacgccattctcctgcctcagcctcccgagtagctgggactacaggcgcccgccaccacatccggctaattttttgtatttttagtagagacggggtttgaccgtgttagccaggatggtcttgatctcctgaccttgtgatccgcctgcctcagcctcccaaagtgctgggattacaggcttgggccaccgcgcccagccaatgtcctagagagttttgtgatctgaattctttatgtatatttgtagctatatttcatacaaagtgctttaagtgtggagagtcaattaaacacctttactcttagaaatacggattcggcagccttcagtgaatattggtttctctttggtatgtcaataaaagtttatccgtatgtcagaacggatttgtggaattttcagttctgcctcttgcatattggaatacccaatatttcaggtaccgtgttgaagcataaatagcccccaggcaagaaacaggcttaagactctactttgcttagtgctgggtacaatgtcctcaccccatgagcccactcccacttcctgaagccctgggacctggaaagtccttttttttacttcttgggatttgtcatatatgaaatgttacaaaagttttttgttttttgttttcctccaatataacaatagagtcttaaacaaaagtactgattaaaaatggatatttgggctcaggcctgtaatctcagcactgtgggaggacaagttaagaggatcacttgaggacaggaattcgagaccagcctggacaacagagcaagaccctgtctctgcaaaaaataaaaacattagctggatgtggcggcacgcacctgtagtcccagctacttggtgggctgagatgggaggatcccttgaactcagtagttcaaggctgcagtgagctgtgactctgccattgtactccagcctgggtgacagtgagaccccgtctcttaaaaaaaaaaaaaaaaaaaaagatttttgcaaaatcccttaaagttaaaagaattaaaaacaggttttactaattcacaagggccagcattttcccctaaatgaattaaattttaataactcctaagaggctattataaaccatttcttttttataaatgccttggaaatactccgaaagccaggtttatgtttgttttgagcagagccaagcaagggaaatttcagaacatgctttgaatgtgtgagatgctataccctccctggaggaaaaatgggggg

SEQ ID NO: 26 - DNA, 2968 bp, Homo sapien
cccggcattccgtgctccttggttccggcgttggagctctttggggcccagctttgcggacccgggagctcgggacgcaggcggggcttgtgctccgcgggggcagggcgtagggtgggcctcctacctcccctgatctcgcggtttgttccgtttcattggagcttcccggaccgtgtgctcgacggtgccctaggtgccgtggggccacacgcgagtctgataagcaccctcccccggaatcatgcggtgctgtgaggcctagcgaagatgaagatagaatgcaaggtagaaagtgctggatacctttagaaagctgcaggactggtgcgatgggagttgagacgtaagaacctgcccgtccgtagggctctggatgctgctgaggcccgaggcccctatggcagatttgaaaattcacccttgtagagtcattcctgcctttgagcggactcccttttaagtttacagaagcacttgcagaactcatcagaagccaccccgcttatcagcagatctcaagagagcgttcggtggaggccctgggtctgcacagctcacctccctgggaactgctcgcccgagcgtcggagccggcgctggccccctgcagccggaaggttgcagccgcaggagccccggaggcccaggacacaggatctagggaaggaacagaagagtgtcgtctcctagaaatctagcactggagaaacgaggaaaattcttccagcgatggtctcccactcagagctgaggaagcttttctactcagcagatgctgtgtgttttgatgttgacagcacggtcatcagagaagaaggaatcgatgagctagccaaaatctgtggcgttgaggacgcggtgtcagaaatgacacggcgagccatgggcggggcagtgcctttcaaagctgctctcacagagcgcttagccctcatccagccctccagggagcaggtgcagagactcatagcagagcaacccccacacctgacccccggcataagggagctggtaagtcgcctacaggagcgaaatgttcaggttttcctaatatctggtggctttaggagtattgtagagcatgttgcttcaaagctcaatatcccagcaaccaatgtatttgccaataggctgaaattctactttaacggtgaatatgcaggttttgatgagacgcagccaacagctgaatctggtggaaaaggaaaagtgattaaacttttaaaggaaaaatttcattttaagaaaataatcatgattggagatggtgccacagatatggaagcctgtcctcctgctgatgctttcattggatttggaggaaatgtgatcaggcaacaagtcaaggataacgccaaatggtatatcactgattttgtagagctgctgggagaactggaagaataacatccattgtcgtacagctccaaacaacttcagatgaatttttacaagttatacagattgatactgtttgcttacagttgcctattacaacttgctatagaaagttggtacaaatgatctgtactttaaactacagttaggaatcctagaagattgctttttttttttttttaactgtagttccagtattatatgatgactattgatttcctggagaggttttttttttttttgagacagaatcttgctctgttgcccaggctggagtgcagtggcgcggtctcggctcactgcaagctctgcctcccaggttcacgccattctcctgcctcagcctcccgagtagctgggactacaggcgcccgccaccacatccggctaattttttgtatttttagtagagacggggtttgaccgtgttagccaggatggtcttgatctcctgaccttgtgatccgcctgcctcagcctcccaaagtgctgggattacaggcttgggccaccgcgcccagccaatgtcctagagagttttgtgatctgaattctttatgtatatttgtagctatatttcatacaaagtgctttaagtgtggagagtcaattaaacacctttactcttagaaatacggattcggcagccttcagtgaatattggtttctctttggtatgtcaataaaagtttatccgtatgtcagaacggatttgtggaattttcagttctgcctcttgcatattggaatacccaatatttcaggtaccgtgttgaagcataaatagcccccaggcaagaaacaggcttaagactctactttgcttagtgctgggtacaatgtcctcaccccatgagcccactcccacttcctgaagccctgggacctggaaagtccttttttttacttcttgggatttgtcatatatgaaatgttacaaaagttttttgttttttgttttcctccaatataacaatagagtcttaaacaaaagtactgattaaaaatggatatttgggctcaggcctgtaatctcagcactgtgggaggacaagttaagaggatcacttgaggacaggaattcgagaccagcctggacaacagagcaagaccctgtctctgcaaaaaataaaaacattagctggatgtggcggcacgcacctgtagtcccagctacttggtgggctgagatgggaggatcccttgaactcagtagttcaaggctgcagtgagctgtgactctgccattgtactccagcctgggtgacagtgagaccccgtctcttaaaaaaaaaaaaaaaaaaaaagatttttgcaaaatcccttaaagttaaaagaattaaaaacaggttttactaattcacaagggccagcattttcccctaaatgaattaaattttaataactcctaagaggctattataaaccatttcttttttataaatgccttggaaatactccgaaagccaggtttatgtttgttttgagcagagccaagcaagggaaatttcagaacatgctttgaatgtgtgagatgctataccctccctggaggaaaaatgggggg

SEQ ID NO: 27 - DNA, 2664 bp, Homo sapien
tatatcaactttctgtgtcaagatctttaggtgaagaacagttttctgtgggatctgtcaacttcatgaaacagaccaatatccagaaaaatactaataccagagatacaagtaaaaaaacaaaagaccagctcatcatcgacgctggtcagaaacattttggggctactgtgtgcaagtcttgtggtatgatatatactgcttccaaccctgaagatgaaatgcagcatgtacagcatcaccacaggtttctggaaggaatcaaatatgtgggttggaagaaagaacgtgtagtagcagagttttgggatgggaaaatcgtgttggttctgccacatgatccaagctttgctatcaaaaaggtagaagatgtccaagaacttgttgataatgaattgggcttccagcaagttgttcctaaatgtccaaacaaaataaaaacttttctttttatatctgatgaaaagagagtagttgggtgtttaattgcagaacccatcaaacaggcatttcgtgtcctgtctgaaccaattggtccagaatccccaagctctacggaatgtcctagggcttggcaatgttcagatgtaccagaacctgcagtctgtgggataagtagaatctgggttttcagactgaagagaagaaagcgcattgcaagacgactggttgataccctcaggaattgcttcatgtttggctgttttctcagcactgatgaaatagcattttctgacccaacaccagatggcaagttatttgcaaccaagtactgcaacacccctaatttcctcgtatataattttaatagttaaagctgatttcagttataaaggagttactatctggataagttcaaagagctccttattataaaatacaaactatttaatatcaaaataaaaaataccgagactcacactcatacacacacacacacacacacacacacacacatatcacagttgtgttccttatgagttgaaaagtcaggaataaatttgttgaaaattatctggggattcaaaggaaaaatctttggggtgattccctgattagcactctgaatgtttaattatgaaactttgtagctataactggaaaattacctgactctttgtaagagtattaaatacaaagtgatttttctctagaaatgtgacctggtcttttataaagcccactcttagaccaggattatctaatgccacatcagaagcaaacaggcaaatttaaacttgggcaagtaatttctgtgcccaatttgtaaagggaattcctgaattttttttttttttaatagaggcatgggtctcactgtgttgcccaggctggtctgaaacttttgggctcaagcgatcctcccaaaacgctgggattacagtcatgagccaccgtgcccagcctaattcctgacttctctatacagagtcttcacttgataggcactcgtctgtagtaactcagtttgaatatctttagaaaatgtttagaatttatttgtaacaagatggtaaggaataagattatcccatatgcatttctgtagagcagaatttgatagcttagtgttcaatctttttgaaaataaatgtttacctgtcatcagatttaattaaaattatacttagtaattgcactattacttagttaatttttgttgtatggaaatattggtagtactactttgggaacctgttactgacaattgatgtcattaacaaaatgcctagttggattagatgttttcattttctaattttttgcttgtttaaaatgcaccttacttgttctgagatacctggcaaaagtctttacaaaatgtatggtaatagaaccaaggttagtaaatatacataggctggtggatgagagaccatggaactgtgtaaatacacttaaatgttcacacatttttctagtgtaattcttggatactttaaaaagcaaaacattgttcaaattgttttgattctgaaaaatcattcaactgctaactggcaataagactctaggcaagtcgttttccagattgtaattatatgtagaaactattcatctgcattcattttatttgcctgtaagttaacatgtttccaaaatttaaaagcctgggtccccaaaagaatgtggaagtattaaaatgtatgtaattatgcaaacattttaatgctattttctgcacttatttcttttaaatattttatttaaaatttttaattaacattttgtttgcttaatgcttttgttatgaatcaattaaaattctttattttatacaactaaatctgattttaattattttattatgaaaatagtatatgttaaataaaattcagataatacagaaatagagattgccaaaagaagaggcttcccggccgggcgcggtggctcacgcctgtaatcccagcactttgggaggccgaggcgggtggatcatgaggtcaggagatcgagaccatcctggctaacaaggtgaaaccccgtctctactaaaaatacaaaaaattagccgggcgcggtggcgggcgcctgtagtcccagctactcgggaggctgaggcaggagaatggcgtgaacccgggaggcggagcttgcagtgagccgagattgcgccactgcagtccgcagtccggcctgggcgacagagcgagactccgt

SEQ ID NO: 28 - DNA, 1757 bp, Homo sapien
ctagcatcataggtcaaagacgttattaagtatcgactctgaaaaagcaactataaatactgcaaatcgactaagccagaggacgcaaatatatcctgcgtgttgtgtgctggactgtggttgagacttcatggtcgtgctctgggctcatgggggcagctgactgctcataattaagattgctgttgccgctgcctgtgttccaaagagaacacaagaggacagagctaaggtgtaggaatgcggaagaacttgcagaaactagagctagtcttcggattgaaatgaattaccaataaagggttgggaaatggatcaaggagagggaagcgttttgatggtccctgctccgaggttcagcccatttgcagttgctgataaccttgtcaggtcaccagataaaggcaagtcttgtcaccctcaggcacctggctgcgaagtaataaaacggttgccttatcatctaaaggtggagtgagtcaaacctcagcccagggtaattatagtaaactgaaattgcctgtcctttacaaaaaaaaaggcggagggagagagaaaggaaaagggcttaaggcaggaaattgtgtttgtctttctccttggatttaaaaaagaaacgagcaaaacagcaaaaagttttccagggagtgagaaaagcagcccggctagactcccctcaccctgggttaacaggattgccgacagatcaggcccacgtgatggtcaagaaaagaggctcaagctgatgaaaatccaagaaatcttcttaggagccttcctttctaaatgtaaatgactgagtcattgctttgctaaggagggaaggaagttacaatcacaccaagtgactcattcattgctgttagctccggcagttggatgaaaagttttagcaaaagcagcaacaaatgtactttaaatactagcacagtaagggaattcctgtctttcaggatgaatgccatccacacaaaagagctcctgttgacatctcatttacaatctcccccaggacacagacaagaccctttcaataaatccagctcagaaacacctattgttcaaaatcttcaactcgccacaggctaccaccactccctatggctttgcaaaattaaagatttagaagaaggatggggcggtggaagctatgaaaagaggcaggaaaaaagttcctttgacccgatgctgtcagagagcgtgcatgaagaagaaagttaatggtatttccatttatataagaagcgcctaagaaatgcctgtgacgttcgtgaactagtgattgtgaattccaaatttgatgccaactttatgtgtaaagaagctaactcctgccaacatcgtggctgaatgaacagctgggactatgcttaacccattcccagcttataaaagccccatggcagctgcagtgaagcatcagaaaagtatagtaagaagaaactgaatttgaagtggattcttacaaaggaaaaagaaaatcactattgtaactataccaaattactatgtatgtgagctcccagctttgacatcaagtcgttacagccacgtaatgggattacgggtgatttttactttattctttgggcttctctgaattttcctatattttgaaaaagcacctgcattattttgtaattataaaaaagtataaataagaattatacacactattatttcttcactgctatgacatgactagattacaatttttttctttttgagatgactttcggtcttgtttcccaggctgg

SEQ ID NO: 29 - DNA, 1299 bp, Homo sapien
caggacaccttgggccagcttggttttactttagatttcactgttgtcccaccccacttcttccttcaccaacatgcaagttctttccttccctgccagccagatagacagatgggagaggcagtcgcggccttcgttgtcagtagttctttgatgtgaaaggggcagcacagtcatttaaacttgatccaacctctttgcatcttacagagttaaacagctaaaagaagtaaaataagaaggcaatgcttgtggaatgtacagtgcatattgacggcacacgcctcattacgattcgcctgcttgcttctcctgttcaatcgtttctttggaaggcagtggatttttctcttgcgtctctgtcttcttcagtttcgacttatcgaatttctcgatctcagccatatcggatttgtcagacatggttacggaggagaagcggagcgaggcacgcgagaacgagcgaagtctggccttcgtcaagatggttggacaccacgtcgccttcctggaagcagacgtgcttcaggctgagcgggaccatggggccttccctcaggccctgcggaggtggctgggatccgcagggctcccctccttcaggaacaagtcacctgcaccggtgcccgtgacgtacgagctgcccacactgtataggacggaggactattttcctgtggacgccggggaagcacagcaccacccccgcacctgccctcggcctttgtgagctttgtggtcttcccatcaggaacgctggaaagtgacattgtgtacacactgcagcttgggggttttttctttgtattgctgtttattttatattttaaaaatatttaaaaaaatgtcgagatggggtctcactatgttgtccagactgatctcaaactcctgggctcaagtgatccacccaccttggccttccaaagtggtgggattatgggcaggagcctccgtgcccaggctgctgccattttcaaatttcctccctgcctcatgtgagaccacagggtttggagaagcagttggaacccacgtgtggtgatgcctcccacatcggcctgcttggggttctacaggggttgagggaccaggcctggccggggctgatggacagtggggactttccttctctccatgatggctttgcaggggctccatggtccttctctctgtgatgggtttttgcacggggtgtgctctgccactgtggtgggtgggtggatgctgcttctgttgcctccagacctcggtgcccacagccttgaggatccttccaataaaggtgtcaagagctca

SEQ ID NO: 30 - DNA, 2456 bp, Homo sapien
gggttcacaagcgagagcagggggcacagcttccacccgtcctagccagggtgagaccaccctgcctgctggtggagccaggcgggcccagagcccacctggaagatggaggctgcacggcactgcgtggtccggggcagccccagggcagcagagcattccctggccttccctgctggtgccagctccttaccacagagacgccgcgtggaactcactactggcgatcgcggacgccccaggaaggcgagtggcacgaggtgtggcggggctgccacaggcagtcacggagcacccgctggtgccaggctcacccctcagatacagcctcgtgggctggctcagtggcggccctgactctccaaggtctgaggtctgctctgtcttccattccatgactcacaggaggttcaaggttacttccactgtggcagctgcctccctcctccctctccaggatggaaggaggtcctgctgtgcaaacctgcctggctgtccccttccgggacacggacagggggtttcctggcagttcctggtcctcccttgagggctaagggtccccccgttctgtggccgcctccagcacatccacccagagtccctgggcgtgaacacagccgctggggacgatcaccgcctgcccagcgtgcagccctggggctgcgtccttatctccgctcctcctgcctcctgcccagctgttcaacgtctacccatggctcggggccctgctccagctgcaccggcccgtcctgcgcaagatcgaggaggtccgtgccattctgaggaccctcctggaggcgcggaggccccacgtgtgcccgggggaccccgtgtgcagctatgtggacgccctgatccagcagggacagggggatgaccccgagggcctgtttgctgaggccaacgcggtggcctgcaccctggacatggtcatggccgggacggagacgacctcggccacgctgcagtgggccgcacttctgatgggccggcacccggacgtgcagggtgagaccccggcgcctggcgagacggctccttctgcccccgggggacccccagggacgagggatggcgctgccacccaagcggcccaccctttgccccaggccgggtgcaggaggagctagaccgcgtgctgggccctgggcggactccccggctggaggaccagcaggctctgccctacacaagcgccgtgctccacgaggtgcagcggttcatcacgctcctgccgcacgtgccccgctgcaccgcggccgacacacagctgggcggcttcctgctccccaagggcacgcccgtgattcccctgctgacctcggtgctcctggatgagacacagtggcagaccccaggccagttcaaccccggccatttcctggacgcgaatgggcactttgtgaagcgggaggccttcctgcctttctctgcaggccgccgcgtctgtgttggggagcgcctggccaggaccgagctcttcctgctgtttgccggcctcctgcagaggtaccgcctgctgcccccgcctggcgtcagtccggcctccctggacaccacgcccgcccgggcttttaccatgaggccgagggcccaggccctgtgtgcggtgcccaggccctaggagctcccccagcccccaggtcctcctgaccactcccctcccagccctgggtcctcccaccctctctcctcccaccccacagctcggactgctctgggagggccctgaggactcccaccctcacccccacccccacagggtcagcaactgcttccggttacacccaggactacccctgcccgaccctgtgggacccccacccctctgatgctgtctgcagctcagtccctgccagcccccaggagcgcctccagggccccgcccactctcccacccctgaagctgcactcccacccacctagctccccccagggccccccagcacctacagctggggctgcagggagacaacgggtggctgcatccagccagagacaggcgcaggtgggtgtcctcagcgtgcgagccctgcaccccccaggtcctgggactcctgcagaccccactccattcccgctcctggaacacttcctgcagctgtgcctggaggcagtcggcctgcagtgccagactctgagccaagccactggggccatgcgtatgactggtgcagggaggcaaggcccacattctccttcagagacaggcactggcgccagaggcttccttggggcggggggagggcacctcagcccctgaagacaagcagcactgcagtggcaaaaatggaaacactgacccggtgcggtggctcatgcctgtaatcccagcactttgggaggccgaggcaggcgaatcacgaggtcaggagttcgagaccagcctgcccaacatggtgaaaccctgtctctactaaaaatacaaaaaaattaaccgagcatggtgg

SEQ ID NO: 31 - DNA, 642 bp, Homo sapien
gggaaaggccatgttccctcctctgtgccatgtccccacgtctcaggcctttgtcaacgaatccctcagcccggacagagggccgtggcatggctaatggcttggagaagcagctgaggtgctgctttatggcataaggtgagcgtcctttgtcttggagtcctctgggcaggggacacttgtgcctggtgcccctgggaggaaggagaggagcatgtgcgggaaagagcaggaggccgaggtgggctgatcacgaggtcaggagttcgagaccagcctggccaacatggcacacatggcacgcacatcgtggcgatgtcgcgtgccatgtgtctgatgctgctgagcgtggcgcgagcattcttgttgatggtggtccgcacataggaggtggcaggcttccgctggccggatctccgcttaatgaccaccacgacacctttgccgtcggctgccggctccacgcccacagtcttgcggtgaatcagtccgttgtagcggaaggaattgcgggccctcaagttattgggctcagtgctgtagtttttggattatcattttaaaacatggaaaactggagcagttccgcacgaccaatccagttgctaatgcctgagcatcggtacgcagacatacgccagc

SEQ ID NO: 32 - DNA, 3907 bp, Homo sapien
gcgaattgggcctctagacgcatgctctagcaggcggcgcagtgtgctggaaaggaccaatcgacctgaggacttgcgagccgctcagctcccgggacgtttggagctgctgctaaataatttctgctcagccatgtcgccggctccagatgcagccccggctcctgcgtcgatctccctgtttgacctcagcgcggatgctccggtctttcagggcctgagcctggtgagccacgcgcctggggaggctctggcccgggctccgcgtacttcctgttcaggctcaggggagagagaaagcccagaaagaaagctactccagggtcctatggatatttcagagaagttattttgttcaacttgtgaccagaccttccagaaccaccaagaacagagggaacattataagcttgactggcatcggtttaacctaaagcaacgtctcaaggacaagcctctcctgtctgccctggactttgaaaagcagagctccacaggagatctttccagcatctcgggatcagaagactcagactcagccagtgaggaggacttgcagacactggatcgggagagggctacatttgagaagttgagccgacccccaggcttttaccctcatcgagttcttttccagaatgcccagggccagtttctttatgcctaccgctgtgtcctaggccctcatcaggatcccccagaagaggcagaactgctgctacagaacctgcaaagtagaggtcccagagactgcgtggtgctcatggctgcagctgggcactttgctggtgctatatttcaaggaagagaagtggtgacacacaaaacttttcaccgctatacggttcgggccaagcggggcacagcccaggggcttcgggatgcccgaggtgggccatcacactctgctggagccaacctgaggcgctacaatgaagccacactatataaggatgttcgtgacctgctggcagggccaagctgggctaaggcgctggaggaggctggtacaatactgttgcgtgctccccgctctggccggtctttgttctttggaggcaagggagcacccctgcaaaggggggatccccgactttgggatatccccctcgccacccgcagacccaccttccaagagctacagcgtgtgctccataagctgaccactttgcatgtctatgaagaagaccctcgggaagcagtcagactgcactcacctcagacacactggaaaacagtaagagaggagagaaagaagcctactgaggaagaaataagaaagatctgcagggatgaaaaggaagcgctggggcagaatgaggaatctcccaaacagggtttgattactatctggcaactgtcagatctgagtttctgtcctaaaaatgcactggcaaattccctactctcataactgacccatttccttatttaaacacacacccacagtgtctatcttagcaattactgagacatgtttagtgacctttccaaatctattatctcttttgttatggatgtttccccagagctaagaaaatctttgtgtggagcagatgcgtggatgtgttgcatggatctcacatagtttatctttgattggatgctgtggtttgaggctgagggctgcttccatgctttcctctattgtgcggcaccctaaggctactcatacggagagtccagggacttgttcttgtctgggctgagagcctcatttctgcatgtgatataatggactcagctcttgatgtgctacttttatctgggtgacaaaataaaaacaatttcatttcaggctttcattcttatgcatctgcttctaccctctgagtactccctagatggatttcacatgtcaggtttttccctaggttcagggtcggagggagaagatggctttcaggtagagttggagctagtggagttgactgtggggactctggatctttgtgagtctgaagtattgcccaagcggaggaggagaaaaaggaataagaaggagaaaagccgagaccaggaggctggggcacatcggactcttctccagcaaactcaagaagaggagccttccacacagtcatcccaggcagttgctgcccccttgggccctttgctggatgaggccaaagcccctggtcagccagagctctggaatgcactgcttgctgcttgccgagctggagatgttggagtgctaaagctgcagctagctcccagccctgcagaccctagagttctgtctctgctcagtgcccccttgggctccggtggctttactctcctgcatgcagcagctgcagctggaagaggctcagtggttcgtctgctgctggaagcaggtgctgaccccactgtgcagtgagtaaaggtccccatcctgagtcattttgggtatagagaggataatttggaggttaaagttggcattggctacttggcaatattcccttggtctggttgggtgatgttgggaaaggcaggaggcaagttaaacccatttttggagtttttgcacctagggactctcgggcccggccaccttatactgttgcggctgacaaatcaacacgtaatgagttccgaaggttcatggagaagaatccagatgcctacgattacaacaaggctcaggtcatctggaataggaaggacaagcagagtgggaaggcatcacagatcctggctagatcctttctacttcttgcagttttaccaaagataacttatagggtcttatatttgaaatcctccaggtgccaggaccattgacaccagaaatggaggcacggcaggctacacggaaaagggagcagaaggcagcccggcggcaacgggaggaacagcagcagaggcagcaggagcaggaggagcgtgaacgagaagagcagcggcgatttgccgccctcagtgaccgagagaagagagctctggctgcagagcgccgactcgctgcccagttgggagcccctacctctccaatccctgactctgcaatcgtcaatactcgacgctgctggagttgtggggcatccctccaaggcctgactccctttcactacctcgacttctctttctgctccacacgttgcctccaggatcatcgccgtcaggcagggaggccctcttcctgatctcttacagctctacctggggccaactcagggacctgagagggcacattcacagcagccctaggttttttcttccccgtgaaaccagagatgatttggaagatgggggtgaaggacactcgggaactagggcaaagacagggctagaggtatgtggagctggtactgtctctggaattttaatcacaataaagtttggcaaggaatgtgtacttgtacttacattcagaggcactgtggcctttagttccttagggtcaccgtggccagcaccaagggatcctgcccactccatgtcccaggtccaagggttactttttttttttttttttttttttgagatggagtgtctcactgtcagccaggctggaagcgagactctgtctcaaaaaacacaaacaaacaaacaaaagaaatgtaaaatctcagatcctacctcagacctatagaatcagaatttgtattttaacaagattcccaggtgatcctaggcaccttcaaaattgagaagcatggctttacttgactgggctccctgaggacagggagtgccctgttcatctcaaatcctcagcctctagcacagggccgggtatatagtaggttaaatctggatgaatcaatgtcataaccaaaaggctaaaacaggttcagaaccaggggaaaccattggaaaatcttcagggtgatccggggtgtggaagggaggaaccaggtcacaagaaggacctctttcctggagagtcctgtttcagcaaaacagccattccctc

SEQ ID NO: 33 - DNA, 3608 bp, Homo sapien
gcgaattgggcctctagacgcatgctctagcaggcggcgcagtgtgctggaaaggaccaatcgacctgaggacttgcgagccgctcagctcccgggacgtttggagctgctgctaaataatttctgctcagccatgtcgccggctccagatgcagccccggctcctgcgtcgatctccctgtttgacctcagcgcggatgctccggtctttcagggcctgagcctggtgagccacgcgcctggggaggctctggcccgggctccgcgtacttcctgttcaggctcaggggagagagaaagcccagaaagaaagctactccagggtcctatggatatttcagagaagttattttgttcaacttgtgaccagaccttccagaaccaccaagaacagagggaacattataagcttgactggcatcggtttaacctaaagcaacgtctcaaggacaagcctctcctgtctgccctggactttgaaaagcagagctccacaggagatctttccagcatctcgggatcagaagactcagactcagccagtgaggaggacttgcagacactggatcgggagagggctacatttgagaagttgagccgacccccaggcttttaccctcatcgagttcttttccagaatgcccagggccagtttctttatgcctaccgctgtgtcctaggccctcatcaggatcccccagaagaggcagaactgctgctacagaacctgcaaagtagaggtcccagagactgcgtggtgctcatggctgcagctgggcactttgctggtgctatatttcaaggaagagaagtggtgacacacaaaacttttcaccgctatacggttcgggccaagcggggcacagcccaggggcttcgggatgcccgaggtgggccatcacactctgctggagccaacctgaggcgctacaatgaagccacactatataaggatgttcgtgacctgctggcagggccaagctgggctaaggcgctggaggaggctggtacaatactgttgcgtgctccccgctctggccggtctttgttctttggaggcaagggagcacccctgcaaaggggggatccccgactttgggatatccccctcgccacccgcagacccaccttccaagagctacagcgtgtgctccataagctgaccactttgcatgtctatgaagaagaccctcgggaagcagtcagactgcactcacctcagacacactggaaaacagtaagagaggagagaaagaagcctactgaggaagaaataagaaagatctgcagggatgaaaaggaagcgctggggcagaatgaggaatctcccaaacagggtttgattactatctggcaactgtcagatctgagtttctgtcctaaaaatgcactggcaaattccctactctcataactgacccatttccttatttaaacacacacccacagtgtctatcttagcaattactgagacatgtttagtgacctttccaaatctattatctcttttgttatggatgtttccccagagctaagaaaatctttgtgtggagcagatgcgtggatgtgttgcatggatctcacatagtttatctttgattggatgctgtggtttgaggctgagggctgcttccatgctttcctctattgtgcggcaccctaaggctactcatacggagagtccagggacttgttcttgtctgggctgagagcctcatttctgcatgtgatataatggactcagctcttgatgtgctacttttatctgggtgacaaaataaaaacaatttcatttcaggctttcattcttatgcatctgcttctaccctctgagtactccctagatggatttcacatgtcaggtttttccctaggttcagggtcggagggagaagatggctttcaggtagagttggagctagtggagttgactgtggggactctggatctttgtgagtctgaagtattgcccaagcggaggaggagaaaaaggaataagaaggagaaaagccgagaccaggaggctggggcacatcggactcttctccagcaaactcaagaagaggagccttccacacagtcatcccaggcagttgctgcccccttgggccctttgctggatgaggccaaagcccctggtcagccagagctctggaatgcactgcttgctgcttgccgagctggagatgttggagtgctaaagctgcagctagctcccagccctgcagaccctagagttctgtctctgctcagtgcccccttgggctccggtggctttactctcctgcatgcagcagctgcagctggaagaggctcagtggttcgtctgctgctggaagcaggtgctgaccccactgtgcagtgagtaaaggtccccatcctgagtcattttgggtatagagaggataatttggaggttaaagttggcattggctacttggcaatattcccttggtctggttgggtgatgttgggaaaggcaggaggcaagttaaacccatttttggagtttttgcacctagggactctcgggcccggccaccttatactgttgcggctgacaaatcaacacgtaatgagttccgaaggttcatggagaagaatccagatgcctacgattacaacaaggctcaggtgccaggaccattgacaccagaaatggaggcacggcaggctacacggaaaagggagcagaaggcagcccggcggcaacgggaggaacagcagcagaggcagcaggagcaggaggagcgtgaacgagaagagcagcggcgatttgccgccctcagtgaccgagagaagagagctctggctgcagagcgccgactcgctgcccagttgggagcccctacctctccaatccctgactctgcaatcgtcaatactcgacgctgctggagttgtggggcatccctccaaggcctgactccctttcactacctcgacttctctttctgctccacacgttgcctccaggatcatcgccgtcaggcagggaggccctcttcctgatctcttacagctctacctggggccaactcagggacctgagagggcacattcacagcagccctaggttttttcttccccgtgaaaccagagatgatttggaagatgggggtgaaggacactcgggaactagggcaaagacagggctagaggtatgtggagctggtactgtctctggaattttaatcacaataaagtttggcaaggaatgtgtacttgtacttacattcagaggcactgtggcctttagttccttagggtcaccgtggccagcaccaagggatcctgcccactccatgtcccaggtccaagggttactttttttttttttttttttttttgagatggagtgtctcactgtcagccaggctggagtgcagtggtacaacctccactcactgcaacctctgcctcctggattcaagcaattctcctgccctcagcctcccaagtagctgggattagaggtgcccaccatcacgcccggctaatttttgtatttttttgagatggagtgtctcactgtcagccaggctggagtgcagtggcacaatctcggctcactgcaacctctgcctccgagattcaagcgattctcc

SEQ ID NO: 34 - DNA, 3550 bp, Homo sapien
gcgaattgggcctctagacgcatgctctagcaggcggcgcagtgtgctggaaaggaccaatcgacctgaggacttgcgagccgctcagctcccgggacgtttggagctgctgctaaataatttctgctcagccatgtcgccggctccagatgcagccccggctcctgcgtcgatctccctgtttgacctcagcgcggatgctccggtctttcagggcctgagcctggtgagccacgcgcctggggaggctctggcccgggctccgcgtacttcctgttcaggctcaggggagagagaaagcccagaaagaaagctactccagggtcctatggatatttcagagaagttattttgttcaacttgtgaccagaccttccagaaccaccaagaacagagggaacattataagcttgactggcatcggtttaacctaaagcaacgtctcaaggacaagcctctcctgtctgccctggactttgaaaagcagagctccacaggagatctttccagcatctcgggatcagaagactcagactcagccagtgaggaggacttgcagacactggatcgggagagggctacatttgagaagttgagccgacccccaggcttttaccctcatcgagttcttttccagaatgcccagggccagtttctttatgcctaccgctgtgtcctaggccctcatcaggatcccccagaagaggcagaactgctgctacagaacctgcaaagtagaggtcccagagactgcgtggtgctcatggctgcagctgggcactttgctggtgctatatttcaaggaagagaagtggtgacacacaaaacttttcaccgctatacggttcgggccaagcggggcacagcccaggggcttcgggatgcccgaggtgggccatcacactctgctggagccaacctgaggcgctacaatgaagccacactatataaggatgttcgtgacctgctggcagggccaagctgggctaaggcgctggaggaggctggtacaatactgttgcgtgctccccgctctggccggtctttgttctttggaggcaagggagcacccctgcaaaggggggatccccgactttgggatatccccctcgccacccgcagacccaccttccaagagctacagcgtgtgctccataagctgaccactttgcatgtctatgaagaagaccctcgggaagcagtcagactgcactcacctcagacacactggaaaacagtaagagaggagagaaagaagcctactgaggaagaaataagaaagatctgcagggatgaaaaggaagcgctggggcagaatgaggaatctcccaaacagggtttgattactatctggcaactgtcagatctgagtttctgtcctaaaaatgcactggcaaattccctactctcataactgacccatttccttatttaaacacacacccacagtgtctatcttagcaattactgagacatgtttagtgacctttccaaatctattatctcttttgttatggatgtttccccagagctaagaaaatctttgtgtggagcagatgcgtggatgtgttgcatggatctcacatagtttatctttgattggatgctgtggtttgaggctgagggctgcttccatgctttcctctattgtgcggcaccctaaggctactcatacggagagtccagggacttgttcttgtctgggctgagagcctcatttctgcatgtgatataatggactcagctcttgatgtgctacttttatctgggtgacaaaataaaaacaatttcatttcaggctttcattcttatgcatctgcttctaccctctgagtactccctagatggatttcacatgtcaggtttttccctaggttcagggtcggagggagaagatggctttcaggtagagttggagctagtggagttgactgtggggactctggatctttgtgagtctgaagtattgcccaagcggaggaggagaaaaaggaataagaaggagaaaagccgagaccaggaggctggggcacatcggactcttctccagcaaactcaagaagaggagccttccacacagtcatcccaggcagttgctgcccccttgggccctttgctggatgaggccaaagcccctggtcagccagagctctggaatgcactgcttgctgcttgccgagctggagatgttggagtgctaaagctgcagctagctcccagccctgcagaccctagagttctgtctctgctcagtgcccccttgggctccggtggctttactctcctgcatgcagcagctgcagctggaagaggctcagtggttcgtctgctgctggaagcagggactctcgggcccggccaccttatactgttgcggctgacaaatcaacacgtaatgagttccgaaggttcatggagaagaatccagatgcctacgattacaacaaggctcaggtcatctggaataggaaggacaagcagagtgggaaggcatcacagatcctggctagatcctttctacttcttgcagttttaccaaagataacttatagggtcttatatttgaaatcctccaggtgccaggaccattgacaccagaaatggaggcacggcaggctacacggaaaagggagcagaaggcagcccggcggcaacgggaggaacagcagcagaggcagcaggagcaggaggagcgtgaacgagaagagcagcggcgatttgccgccctcagtgaccgagagaagagagctctggctgcagagcgccgactcgctgcccagttgggagcccctacctctccaatccctgactctgcaatcgtcaatactcgacgctgctggagttgtggggcatccctccaaggcctgactccctttcactacctcgacttctctttctgctccacacgttgcctccaggatcatcgccgtcaggcagggaggccctcttcctgatctcttacagctctacctggggccaactcagggacctgagagggcacattcacagcagccctaggttttttcttccccgtgaaaccagagatgatttggaagatgggggtgaaggacactcgggaactagggcaaagacagggctagaggtatgtggagctggtactgtctctggaattttaatcacaataaagtttggcaaggaatgtgtacttgtacttacattcagaggcactgtggcctttagttccttagggtcaccgtggccagcaccaagggatcctgcccactccatgtcccaggtccaagggttactttttttttttttttttttttttgagatggagtgtctcactgtcagccaggctggagtgcagtggtacaacctccactcactgcaacctctgcctcctggattcaagcaattctcctgccctcagcctcccaagtagctgggattagaggtgcccaccatcacgcccggctaatttttgtatttttttgagatggagtgtctcactgtcagccaggctggagtgcagtggcacaatctcggctcactgcaacctctgcctccgagattcaagcgattctcc

SEQ ID NO: 35 - DNA, 3562 bp, Homo sapien
gcgaattgggcctctagacgcatgctctagcaggcggcgcagtgtgctggaaaggaccaatcgacctgaggacttgcgagccgctcagctcccgggacgtttggagctgctgctaaataatttctgctcagccatgtcgccggctccagatgcagccccggctcctgcgtcgatctccctgtttgacctcagcgcggatgctccggtctttcagggcctgagcctgagggaacattataagcttgactggcatcggtttaacctaaagcaacgtctcaaggacaagcctctcctgtctgccctggactttgaaaagcagagctccacaggagatctttccagcatctcgggatcagaagactcagactcagccagtgaggaggacttgcagacactggatcgggagagggctacatttgagaagttgagccgacccccaggcttttaccctcatcgagttcttttccagaatgcccagggccagtttctttatgcctaccgctgtgtcctaggccctcatcaggatcccccagaagaggcagaactgctgctacagaacctgcaaagtagaggtcccagagactgcgtggtgctcatggctgcagctgggcactttgctggtgctatatttcaaggaagagaagtggtgacacacaaaacttttcaccgctatacggttcgggccaagcggggcacagcccaggggcttcgggatgcccgaggtgggccatcacactctgctggagccaacctgaggcgctacaatgaagccacactatataaggatgttcgtgacctgctggcagggccaagctgggctaaggcgctggaggaggctggtacaatactgttgcgtgctccccgctctggccggtctttgttctttggaggcaagggagcacccctgcaaaggggggatccccgactttgggatatccccctcgccacccgcagacccaccttccaagagctacagcgtgtgctccataagctgaccactttgcatgtctatgaagaagaccctcgggaagcagtcagactgcactcacctcagacacactggaaaacagtaagagaggagagaaagaagcctactgaggaagaaataagaaagatctgcagggatgaaaaggaagcgctggggcagaatgaggaatctcccaaacagggtttgattactatctggcaactgtcagatctgagtttctgtcctaaaaatgcactggcaaattccctactctcataactgacccatttccttatttaaacacacacccacagtgtctatcttagcaattactgagacatgtttagtgacctttccaaatctattatctcttttgttatggatgtttccccagagctaagaaaatctttgtgtggagcagatgcgtggatgtgttgcatggatctcacatagtttatctttgattggatgctgtggtttgaggctgagggctgcttccatgctttcctctattgtgcggcaccctaaggctactcatacggagagtccagggacttgttcttgtctgggctgagagcctcatttctgcatgtgatataatggactcagctcttgatgtgctacttttatctgggtgacaaaataaaaacaatttcatttcaggctttcattcttatgcatctgcttctaccctctgagtactccctagatggatttcacatgtcaggtttttccctaggttcagggtcggagggagaagatggctttcaggtagagttggagctagtggagttgactgtggggactctggatctttgtgagtctgaagtattgcccaagcggaggaggagaaaaaggaataagaaggagaaaagccgagaccaggaggctggggcacatcggactcttctccagcaaactcaagaagaggagccttccacacagtcatcccaggcagttgctgcccccttgggccctttgctggatgaggccaaagcccctggtcagccagagctctggaatgcactgcttgctgcttgccgagctggagatgttggagtgctaaagctgcagctagctcccagccctgcagaccctagagttctgtctctgctcagtgcccccttgggctccggtggctttactctcctgcatgcagcagctgcagctggaagaggctcagtggttcgtctgctgctggaagcaggtgctgaccccactgtgcagtgagtaaaggtccccatcctgagtcattttgggtatagagaggataatttggaggttaaagttggcattggctacttggcaatattcccttggtctggttgggtgatgttgggaaaggcaggaggcaagttaaacccatttttggagtttttgcacctagggactctcgggcccggccaccttatactgttgcggctgacaaatcaacacgtaatgagttccgaaggttcatggagaagaatccagatgcctacgattacaacaaggctcaggtcatctggaataggaaggacaagcagagtgggaaggcatcacagatcctggctagatcctttctacttcttgcagttttaccaaagataacttatagggtcttatatttgaaatcctccaggtgccaggaccattgacaccagaaatggaggcacggcaggctacacggaaaagggagcagaaggcagcccggcggcaacgggaggaacagcagcagaggcagcaggagcaggaggagcgtgaacgagaagagcagcggcgatttgccgccctcagtgaccgagagaagagagctctggctgcagagcgccgactcgctgcccagttgggagcccctacctctccaatccctgactctgcaatcgtcaatactcgacgctgctggagttgtggggcatccctccaaggcctgactccctttcactacctcgacttctctttctgctccacacgttgcctccaggatcatcgccgtcaggcagggaggccctcttcctgatctcttacagctctacctggggccaactcagggacctgagagggcacattcacagcagccctaggttttttcttccccgtgaaaccagagatgatttggaagatgggggtgaaggacactcgggaactagggcaaagacagggctagaggtatgtggagctggtactgtctctggaattttaatcacaataaagtttggcaaggaatgtgtacttgtacttacattcagaggcactgtggcctttagttccttagggtcaccgtggccagcaccaagggatcctgcccactccatgtcccaggtccaagggttactttttttttttttttttttttttgagatggagtgtctcactgtcagccaggctggagtgcagtggtacaacctccactcactgcaacctctgcctcctggattcaagcaattctcctgccctcagcctcccaagtagctgggattagaggtgcccaccatcacgcccggctaatttttgtatttttttgagatggagtgtctcactgtcagccaggctggagtgcagtggcacaatctcggctcactgcaacctctgcctccgagattcaagcgattctcc

SEQ ID NO: 36 - DNA, 4502 bp, Homo sapien
gcgaattgggcctctagacgcatgctctagcaggcggcgcagtgtgctggaaaggaccaatcgacctgaggacttgcgagccgctcagctcccgggacgtttggagctgctgctaaataatttctgctcagccatgtcgccggctccagatgcagccccggctcctgcgtcgatctccctgtttgacctcagcgcggatgctccggtctttcagggcctgagcctggtgagccacgcgcctggggaggctctggcccgggctccgcgtacttcctgttcaggctcaggggagagagaaagcccagaaagaaagctactccagggtcctatggatatttcagagaagttattttgttcaacttgtgaccagaccttccagaaccaccaagaacagagggaacattataagcttgactggcatcggtttaacctaaagcaacgtctcaaggacaagcctctcctgtctgccctggactttgaaaagcagagctccacaggagatctttccagcatctcgggatcagaagactcagactcagccagtgaggaggacttgcagacactggatcgggagagggctacatttgagaagttgagccgacccccaggcttttaccctcatcgagttcttttccagaatgcccagggccagtttctttatgcctaccgctgtgtcctaggccctcatcagaggcaagtgacagtacaggttgcatggctaaccccagccttttgtacacccagcctagatttcccttagcctagtgcatttctccctgcttctcttccttcctgttggttgtgggtatcacgcttgacaacatagtcttgaattgaaactggcctgaattgtggaagggttaagtgtaatggaattaagtttggaaacaaaccaatttaggtttgaattgtgattctaccacttcatcttgactgcctcgccaagcctcaaatttccttgtttgtcaaatggaaacaagcctcagggtggtaatattaaatgagataatgtttgtgaaaattggcccttagtttcttgctctcagtgaatgcaacagatatgtttctgatgcttctctgtcatcaaggatcccccagaagaggcagaactgctgctacagaacctgcaaagtagaggtcccagagactgcgtggtgctcatggctgcagctgggcactttgctggtgctatatttcaagggtgagagggtgctgcatgggggtaaggatggagtggatcctgttagccagggagcaccagctggtctccagtactgagtctgtgctgtctacagaagagaagtggtgacacacaaaacttttcaccgctatacggttcgggccaagcggggcacagcccaggggcttcgggatgcccgaggtgggccatcacactctgctggagccaacctgaggcgctacaatgaagccacactatataaggtgagttaagccttttagatctggtggtactgatccatactttttttgcatctctgttcaactcactgttaagtagggaggtttttgactcatatccttccaattttcattataggtagacaaaggtagatgagggattccccaggagccttagtcctctattctttctccgtgttatcctctactttccaccccttgcacttctgtgggccattttttttagttggagatttataaatagcaagtgaaggtatgcaggactgagttactctcttctctaggatgttcgtgacctgctggcagggccaagctgggctaaggcgctggaggaggctggtacaatactgttgcgtgctccccgctctggccggtctttgttctttggaggcaagggagcacccctgcaaaggggggatccccgactttgggatatccccctcgccacccgcagacccaccttccaagagctacagcgtgtgctccataagctgaccactttgcatgtctatgaagaagaccctcgggaagcagtcagactgcactcacctcagacacactggaaaacagtaagagaggagagaaagaagcctactgaggaagaaataagaaagatctgcagggatgaaaaggaagcgctggggcagaatgaggaatctcccaaacagggtttgattactatctggcaactgtcagatctgagtttctgtcctaaaaatgcactggcaaattccctactctcataactgacccatttccttatttaaacacacacccacagtgtctatcttagcaattactgagacatgtttagtgacctttccaaatctattatctcttttgttatggatgtttccccagagctaagaaaatctttgtgtggagcagatgcgtggatgtgttgcatggatctcacatagtttatctttgattggatgctgtggtttgaggctgagggctgcttccatgctttcctctattgtgcggcaccctaaggctactcatacggagagtccagggacttgttcttgtctgggctgagagcctcatttctgcatgtgatataatggactcagctcttgatgtgctacttttatctgggtgacaaaataaaaacaatttcatttcaggctttcattcttatgcatctgcttctaccctctgagtactccctagatggatttcacatgtcaggtttttccctaggttcagggtcggagggagaagatggctttcaggtagagttggagctagtggagttgactgtggggactctggatctttgtgagtctgaagtattgcccaagcggaggaggagaaaaaggaataagaaggagaaaagccgagaccaggaggctggggcacatcggactcttctccagcaaactcaagaagaggagccttccacacagtcatcccaggcagttgctgcccccttgggccctttgctggatgaggccaaagcccctggtcagccagagctctggaatgcactgcttgctgcttgccgagctggagatgttggagtgctaaagctgcagctagctcccagccctgcagaccctagagttctgtctctgctcagtgcccccttgggctccggtggctttactctcctgcatgcagcagctgcagctggaagaggctcagtggttcgtctgctgctggaagcaggtgctgaccccactgtgcagtgagtaaaggtccccatcctgagtcattttgggtatagagaggataatttggaggttaaagttggcattggctacttggcaatattcccttggtctggttgggtgatgttgggaaaggcaggaggcaagttaaacccatttttggagtttttgcacctagggactctcgggcccggccaccttatactgttgcggctgacaaatcaacacgtaatgagttccgaaggttcatggagaagaatccagatgcctacgattacaacaaggctcaggtcatctggaataggaaggacaagcagagtgggaaggcatcacagatcctggctagatcctttctacttcttgcagttttaccaaagataacttatagggtcttatatttgaaatcctccaggtgccaggaccattgacaccagaaatggaggcacggcaggctacacggaaaagggagcagaaggcagcccggcggcaacgggaggaacagcagcagaggcagcaggagcaggaggagcgtgaacgagaagagcagcggcgatttgccgccctcagtgaccgagagaagagagctctggctgcagagcgccgactcgctgcccagttgggagcccctacctctccaatccctgactctgcaatcgtcaatactcgacgctgctggagttgtggggcatccctccaaggcctgactccctttcactacctcgacttctctttctgctccacacgttgcctccaggatcatcgccgtcaggcagggaggccctcttcctgatctcttacagctctacctggggccaactcagggacctgagagggcacattcacagcagccctaggttttttcttccccgtgaaaccagagatgatttggaagatgggggtgaaggacactcgggaactagggcaaagacagggctagaggtatgtggagctggtactgtctctggaattttaatcacaataaagtttggcaaggaatgtgtacttgtacttacattcagaggcactgtggcctttagttccttagggtcaccgtggccagcaccaagggatcctgcccactccatgtcccaggtccaagggttactttttttttttttttttttttttgagatggagtgtctcactgtcagccaggctggagtgcagtggtacaacctccactcactgcaacctctgcctcctggattcaagcaattctcctgccctcagcctcccaagtagctgggattagaggtgcccaccatcacgcccggctaatttttgtatttttttgagatggagtgtctcactgtcagccaggctggagtgcagtggcacaatctcggctcactgcaacctctgcctccgagattcaagcgattctcc

SEQ ID NO: 37 - DNA, 3316 bp, Homo sapien
gcgaattgggcctctagacgcatgctctagcaggcggcgcagtgtgctggaaaggaccaatcgacctgaggacttgcgagccgctcagctcccgggacgtttggagctgctgctaaataatttctgctcagccatgtcgccggctccagatgcagccccggctcctgcgtcgatctccctgtttgacctcagcgcggatgctccggtctttcagggcctgagcctggtgagccacgcgcctggggaggctctggcccgggctccgcgtacttcctgttcaggctcaggggagagagaaagcccagaaagaaagctactccagggtcctatggatatttcagagaagttattttgttcaacttgtgaccagaccttccagaaccaccaagaacagagggaacattataagcttgactggcatcggtttaacctaaagcaacgtctcaaggacaagcctctcctgtctgccctggactttgaaaagcagagctccacaggagatctttccagcatctcgggatcagaagactcagactcagccagtgaggaggacttgcagacactggatcgggagagggctacatttgagaagttgagccgacccccaggcttttaccctcatcgagttcttttccagaatgcccagggccagtttctttatgcctaccgctgtgtcctaggccctcatcaggatcccccagaagaggcagaactgctgctacagaacctgcaaagtagaggtcccagagactgcgtggtgctcatggctgcagctgggcactttgctggtgctatatttcaaggaagagaagtggtgacacacaaaacttttcaccgctatacggttcgggccaagcggggcacagcccaggggcttcgggatgcccgaggtgggccatcacactctgctggagccaacctgaggcgctacaatgaagccacactatataaggatgttcgtgacctgctggcagggccaagctgggctaaggcgctggaggaggctggtacaatactgttgcgtgctccccgctctggccggtctttgttctttggaggcaagggagcacccctgcaaaggggggatccccgactttgggatatccccctcgccacccgcagacccaccttccaagagctacagcgtgtgctccataagctgaccactttgcatgtctatgaagaagaccctcgggaagcagtcagactgcactcacctcagacacactggaaaacagtaagagaggagagaaagaagcctactgaggaagaaataagaaagatctgcagggatgaaaaggaagcgctggggcagaatgaggaatctcccaaacagggtttgattactatctggcaactgtcagatctgagtttctgtcctaaaaatgcactggcaaattccctactctcataactgacccatttccttatttaaacacacacccacagtgtctatcttagcaattactgagacatgtttagtgacctttccaaatctattatctcttttgttatggatgtttccccagagctaagaaaatctttgtgtggagcagatgcgtggatgtgttgcatggatctcacatagtttatctttgattggatgctgtggtttgaggctgagggctgcttccatgctttcctctattgtgcggcaccctaaggctactcatacggagagtccagggacttgttcttgtctgggctgagagcctcatttctgcatgtgatataatggactcagctcttgatgtgctacttttatctgggtgacaaaataaaaacaatttcatttcaggctttcattcttatgcatctgcttctaccctctgagtactccctagatggatttcacatgtcaggtttttccctaggttcagggtcggagggagaagatggctttcaggtagagttggagctagtggagttgactgtggggactctggatctttgtgagtctgaagtattgcccaagcggaggaggagaaaaaggaataagaaggagaaaagccgagaccaggaggctggggcacatcggactcttctccagcaaactcaagaagaggagccttccacacagtcatcccaggcagttgctgcccccttgggccctttgctggatgaggccaaagcccctggtcagccagagctctggaatgcactgcttgctgcttgccgagctggagatgttggagtgctaaagctgcagctagctcccagccctgcagaccctagagttctgtctctgctcagtgcccccttgggctccggtggctttactctcctgcatgcagcagctgcagctggaagaggctcagtggttcgtctgctgctggaagcaggtgccaggaccattgacaccagaaatggaggcacggcaggctacacggaaaagggagcagaaggcagcccggcggcaacgggaggaacagcagcagaggcagcaggagcaggaggagcgtgaacgagaagagcagcggcgatttgccgccctcagtgaccgagagaagagagctctggctgcagagcgccgactcgctgcccagttgggagcccctacctctccaatccctgactctgcaatcgtcaatactcgacgctgctggagttgtggggcatccctccaaggcctgactccctttcactacctcgacttctctttctgctccacacgttgcctccaggatcatcgccgtcaggcagggaggccctcttcctgatctcttacagctctacctggggccaactcagggacctgagagggcacattcacagcagccctaggttttttcttccccgtgaaaccagagatgatttggaagatgggggtgaaggacactcgggaactagggcaaagacagggctagaggtatgtggagctggtactgtctctggaattttaatcacaataaagtttggcaaggaatgtgtacttgtacttacattcagaggcactgtggcctttagttccttagggtcaccgtggccagcaccaagggatcctgcccactccatgtcccaggtccaagggttactttttttttttttttttttttttgagatggagtgtctcactgtcagccaggctggagtgcagtggtacaacctccactcactgcaacctctgcctcctggattcaagcaattctcctgccctcagcctcccaagtagctgggattagaggtgcccaccatcacgcccggctaatttttgtatttttttgagatggagtgtctcactgtcagccaggctggagtgcagtggcacaatctcggctcactgcaacctctgcctccgagattcaagcgattctcc

SEQ ID NO: 38 - DNA, 4629 bp, Homo sapien
gcgaattgggcctctagacgcatgctctagcaggcggcgcagtgtgctggaaaggaccaatcgacctgaggacttgcgagccgctcagctcccgggacgtttggagctgctgctaaataatttctgctcagccatgtcgccggctccagatgcagccccggctcctgcgtcgatctccctgtttgacctcagcgcggatgctccggtctttcagggcctgagcctggtgagccacgcgcctggggaggctctggcccgggctccgcgtacttcctgttcaggctcaggggagagagaaagcccagaaagaaagctactccagggtcctatggatatttcagagaagttattttgttcaacttgtgaccagaccttccagaaccaccaagaacagagggaacattataagcttgactggcatcggtttaacctaaagcaacgtctcaaggacaagcctctcctgtctgccctggactttgaaaagcagagctccacaggtgatgagtggtagggggacctatgtaggagtaggacatggaggtataagaaagcactagtttagagtttgaggaaagaacaaaaatggggtaccaaacttgtgtatctcatattgtctgtcttcaggagatctttccagcatctcgggatcagaagactcagactcagccagtgaggaggacttgcagacactggatcgggagagggctacatttgagaagttgagccgacccccaggcttttaccctcatcgagttcttttccagaatgcccagggccagtttctttatgcctaccgctgtgtcctaggccctcatcagaggcaagtgacagtacaggttgcatggctaaccccagccttttgtacacccagcctagatttcccttagcctagtgcatttctccctgcttctcttccttcctgttggttgtgggtatcacgcttgacaacatagtcttgaattgaaactggcctgaattgtggaagggttaagtgtaatggaattaagtttggaaacaaaccaatttaggtttgaattgtgattctaccacttcatcttgactgcctcgccaagcctcaaatttccttgtttgtcaaatggaaacaagcctcagggtggtaatattaaatgagataatgtttgtgaaaattggcccttagtttcttgctctcagtgaatgcaacagatatgtttctgatgcttctctgtcatcaaggatcccccagaagaggcagaactgctgctacagaacctgcaaagtagaggtcccagagactgcgtggtgctcatggctgcagctgggcactttgctggtgctatatttcaagggtgagagggtgctgcatgggggtaaggatggagtggatcctgttagccagggagcaccagctggtctccagtactgagtctgtgctgtctacagaagagaagtggtgacacacaaaacttttcaccgctatacggttcgggccaagcggggcacagcccaggggcttcgggatgcccgaggtgggccatcacactctgctggagccaacctgaggcgctacaatgaagccacactatataaggtgagttaagccttttagatctggtggtactgatccatactttttttgcatctctgttcaactcactgttaagtagggaggtttttgactcatatccttccaattttcattataggtagacaaaggtagatgagggattccccaggagccttagtcctctattctttctccgtgttatcctctactttccaccccttgcacttctgtgggccattttttttagttggagatttataaatagcaagtgaaggtatgcaggactgagttactctcttctctaggatgttcgtgacctgctggcagggccaagctgggctaaggcgctggaggaggctggtacaatactgttgcgtgctccccgctctggccggtctttgttctttggaggcaagggagcacccctgcaaaggggggatccccgactttgggatatccccctcgccacccgcagacccaccttccaagagctacagcgtgtgctccataagctgaccactttgcatgtctatgaagaagaccctcgggaagcagtcagactgcactcacctcagacacactggaaaacagtaagagaggagagaaagaagcctactgaggaagaaataagaaagatctgcagggatgaaaaggaagcgctggggcagaatgaggaatctcccaaacagggtttgattactatctggcaactgtcagatctgagtttctgtcctaaaaatgcactggcaaattccctactctcataactgacccatttccttatttaaacacacacccacagtgtctatcttagcaattactgagacatgtttagtgacctttccaaatctattatctcttttgttatggatgtttccccagagctaagaaaatctttgtgtggagcagatgcgtggatgtgttgcatggatctcacatagtttatctttgattggatgctgtggtttgaggctgagggctgcttccatgctttcctctattgtgcggcaccctaaggctactcatacggagagtccagggacttgttcttgtctgggctgagagcctcatttctgcatgtgatataatggactcagctcttgatgtgctacttttatctgggtgacaaaataaaaacaatttcatttcaggctttcattcttatgcatctgcttctaccctctgagtactccctagatggatttcacatgtcaggtttttccctaggttcagggtcggagggagaagatggctttcaggtagagttggagctagtggagttgactgtggggactctggatctttgtgagtctgaagtattgcccaagcggaggaggagaaaaaggaataagaaggagaaaagccgagaccaggaggctggggcacatcggactcttctccagcaaactcaagaagaggagccttccacacagtcatcccaggcagttgctgcccccttgggccctttgctggatgaggccaaagcccctggtcagccagagctctggaatgcactgcttgctgcttgccgagctggagatgttggagtgctaaagctgcagctagctcccagccctgcagaccctagagttctgtctctgctcagtgcccccttgggctccggtggctttactctcctgcatgcagcagctgcagctggaagaggctcagtggttcgtctgctgctggaagcaggtgctgaccccactgtgcagtgagtaaaggtccccatcctgagtcattttgggtatagagaggataatttggaggttaaagttggcattggctacttggcaatattcccttggtctggttgggtgatgttgggaaaggcaggaggcaagttaaacccatttttggagtttttgcacctagggactctcgggcccggccaccttatactgttgcggctgacaaatcaacacgtaatgagttccgaaggttcatggagaagaatccagatgcctacgattacaacaaggctcaggtcatctggaataggaaggacaagcagagtgggaaggcatcacagatcctggctagatcctttctacttcttgcagttttaccaaagataacttatagggtcttatatttgaaatcctccaggtgccaggaccattgacaccagaaatggaggcacggcaggctacacggaaaagggagcagaaggcagcccggcggcaacgggaggaacagcagcagaggcagcaggagcaggaggagcgtgaacgagaagagcagcggcgatttgccgccctcagtgaccgagagaagagagctctggctgcagagcgccgactcgctgcccagttgggagcccctacctctccaatccctgactctgcaatcgtcaatactcgacgctgctggagttgtggggcatccctccaaggcctgactccctttcactacctcgacttctctttctgctccacacgttgcctccaggatcatcgccgtcaggcagggaggccctcttcctgatctcttacagctctacctggggccaactcagggacctgagagggcacattcacagcagccctaggttttttcttccccgtgaaaccagagatgatttggaagatgggggtgaaggacactcgggaactagggcaaagacagggctagaggtatgtggagctggtactgtctctggaattttaatcacaataaagtttggcaaggaatgtgtacttgtacttacattcagaggcactgtggcctttagttccttagggtcaccgtggccagcaccaagggatcctgcccactccatgtcccaggtccaagggttactttttttttttttttttttttttgagatggagtgtctcactgtcagccaggctggagtgcagtggtacaacctccactcactgcaacctctgcctcctggattcaagcaattctcctgccctcagcctcccaagtagctgggattagaggtgcccaccatcacgcccggctaatttttgtatttttttgagatggagtgtctcactgtcagccaggctggagtgcagtggcacaatctcggctcactgcaacctctgcctccgagattcaagcgattctcc

SEQ ID NO: 39 - DNA, 4090 bp, Homo sapien
gcgaattgggcctctagacgcatgctctagcaggcggcgcagtgtgctggaaaggaccaatcgacctgaggacttgcgagccgctcagctcccgggacgtttggagctgctgctaaataatttctgctcagccatgtcgccggctccagatgcagccccggctcctgcgtcgatctccctgtttgacctcagcgcggatgctccggtctttcagggcctgagcctggtgagccacgcgcctggggaggctctggcccgggctccgcgtacttcctgttcaggctcaggggagagagaaagcccagaaagaaagctactccagggtcctatggatatttcagagaagttattttgttcaacttgtgaccagaccttccagaaccaccaagaacagagggaacattataagcttgactggcatcggtttaacctaaagcaacgtctcaaggacaagcctctcctgtctgccctggactttgaaaagcagagctccacaggagatctttccagcatctcgggatcagaagactcagactcagccagtgaggaggacttgcagacactggatcgggagagggctacatttgagaagttgagccgacccccaggcttttaccctcatcgagttcttttccagaatgcccagggccagtttctttatgcctaccgctgtgtcctaggccctcatcaggatcccccagaagaggcagaactgctgctacagaacctgcaaagtagaggtcccagagactgcgtggtgctcatggctgcagctgggcactttgctggtgctatatttcaaggaagagaagtggtgacacacaaaacttttcaccgctatacggttcgggccaagcggggcacagcccaggggcttcgggatgcccgaggtgggccatcacactctgctggagccaacctgaggcgctacaatgaagccacactatataaggatgttcgtgacctgctggcagggccaagctgggctaaggcgctggaggaggctggtacaatactgttgcgtgctccccgctctggccggtctttgttctttggaggcaagggagcacccctgcaaaggggggatccccgactttgggatatccccctcgccacccgcagacccaccttccaagagctacagcgtgtgctccataagctgaccactttgcatgtctatgaagaagaccctcgggaagcagtcagactgcactcacctcagacacactggaaaacagtaagagaggagagaaagaagcctactgaggaagaaataagaaagatctgcagggatgaaaaggaagcgctggggcagaatgaggaatctcccaaacagggtttgattactatctggcaactgtcagatctgagtttctgtcctaaaaatgcactggcaaattccctactctcataactgacccatttccttatttaaacacacacccacagtgtctatcttagcaattactgagacatgtttagtgacctttccaaatctattatctcttttgttatggatgtttccccagagctaagaaaatctttgtgtggagcagatgcgtggatgtgttgcatggatctcacatagtttatctttgattggatgctgtggtttgaggctgagggctgcttccatgctttcctctattgtgcggcaccctaaggctactcatacggagagtccagggacttgttcttgtctgggctgagagcctcatttctgcatgtgatataatggactcagctcttgatgtgctacttttatctgggtgacaaaataaaaacaatttcatttcaggctttcattcttatgcatctgcttctaccctctgagtactccctagatggatttcacatgtcaggtttttccctaggttcagggtcggagggagaagatggctttcaggtagagttggagctagtggagttgactgtggggactctggatctttgtgagtctgaagtattgcccaagcggaggaggagaaaaaggaataagaaggagaaaagccgagaccaggaggctggggcacatcggactcttctccagcaaactcaagaagaggagccttccacacagtcatcccaggcagttgctgcccccttgggccctttgctggatgaggccaaagcccctggtcagccagagctctggaatgcactgcttgctgcttgccgagctggagatgttggagtgctaaagctgcagctagctcccagccctgcagaccctagagttctgtctctgctcagtgcccccttgggctccggtggctttactctcctgcatgcagcagctgcagctggaagaggctcagtggttcgtctgctgctggaagcaggtgctgaccccactgtgcagtgagtaaaggtccccatcctgagtcattttgggtatagagaggataatttggaggttaaagttggcattggctacttggcaatattcccttggtctggttgggtgatgttgggaaaggcaggaggcaagttaaacccatttttggagtttttgcacctagggactctcgggcccggccaccttatactgttgcggctgacaaatcaacacgtaatgagttccgaaggttcatggagaagaatccagatgcctacgattacaacaaggctcaggtcatctggaataggaaggacaagcagagtgggaaggcatcacagatcctggctagatcctttctacttcttgcagttttaccaaagataacttatagggtcttatatttgaaatcctccaggtgccaggaccattgacaccagaaatggaggcacggcaggctacacggaaaagggagcagaaggcagcccggcggcaacgggaggaacagcagcagaggcagcaggagcaggaggagcgtgaacgagaagagcagcggcgatttgccgccctcagtgaccgagagaaggtgaggctggaggttctcttgtccatggcaaggcttcctagaggtctaaccccttccccagcgtgcagctgtcacctcttgggtgccctactcgccactggggccttgtccttaacacaacttgtctccctcagagagctctggctgcagagcgccgactcgctgcccagttgggagcccctacctctccaatccctgactctgcaatcgtcaatactcggtatggggtgcgggatgagggagtgggtggactgtaatgttgcagggaccattgggggcaagagaaatgagtacctgcacagtattcagaagggtggttgagggaatttgggatgttctggcagatgctgcagtgaaaacagaaatggcaggaggagggacggggagagcgtggattggaaagtttctggggtacctgtccagccatttttcttcctcttgttcagacgctgctggagttgtggggcatccctccaaggcctgactccctttcactacctcgacttctctttctgctccacacgttgcctccaggatcatcgccgtcaggcagggaggccctcttcctgatctcttacagctctacctggggccaactcagggacctgagagggcacattcacagcagccctaggttttttcttccccgtgaaaccagagatgatttggaagatgggggtgaaggacactcgggaactagggcaaagacagggctagaggtatgtggagctggtactgtctctggaattttaatcacaataaagtttggcaaggaatgtgtacttgtacttacattcagaggcactgtggcctttagttccttagggtcaccgtggccagcaccaagggatcctgcccactccatgtcccaggtccaagggttactttttttttttttttttttttttgagatggagtgtctcactgtcagccaggctggagtgcagtggtacaacctccactcactgcaacctctgcctcctggattcaagcaattctcctgccctcagcctcccaagtagctgggattagaggtgcccaccatcacgcccggctaatttttgtatttttttgagatggagtgtctcactgtcagccaggctggagtgcagtggcacaatctcggctcactgcaacctctgcctccgagattcaagcgattctcc

SEQ ID NO: 40 - DNA, 3770 bp, Homo sapien
ctacttgcggggctgagatgggtggatcgcttgaacacaggaggttaaggctgcagtgagccgagatcgtgccactgcacactagcctgggcggcgggagtgagaccgtgtctcaaaaacaacaacaacaacaacaacaacaaaaaacaaaaaatggaccgaggttggggtggcaaggctgggctggaatggaggctgaggacaggccctggcagcgcccagggggtagagggcgtgcagcaggaagcaagggccaccctcagggatgggggactgggcctggcagctgccgaggggtaggcaggatgcatgtggagagccacgtggggctgcggctgagccaaggattgtgagaggaatcctgctgctctgggtggcaggcagaaggcctgggccacaggtggggcctgctggggagaccacaggtgaggcaggtatggctgaccctgggcgctcggcacaccggtactcctcctgcctggctgctccctcagcaggtgtcagagtctgagtcaccttttcctcacgtgacccccaccaggaccaggcagggaggtggccatctttggccctgactcagccctgcagggagaagaggggctggaggtgcaggtggcctgccactgtctcccccaacccctgcccacctgggtcttgtgctgtgtgtacttctgctgcgtctgtcctcccttgtgaccagcttctgctggacctgattgtccagccatgatcttctgatcatcatggtttctggacacacatctgttggactaaggaatttgtgttcctggccacagaacagtgccacctctgcctcaagcagttcctggtctgggcactcccccagggaggccggagaggactgagccgtctcctgatgcagaaagtcagccccgctgggcagtgctcgcccaggaagtagggccccacccaacggtgtgctgactgtggaacactgtgtctgcctaggcgggtctggccacattcctgcagcatgatggttggcagttagcttcctggagtgtggacgggtccttccctgcctgactgacttgtccacagggcagcaagaagatgcgccccttggtgtgtcccgagtgtctcctgtaggcagctgagctttcgcaggtctggctgggagccaaggttaccaatctggggggtaacccagccatcatctggatgagcgttggggtctttctgctctggattgcagggcagacgtcgttttgtgctggtcaggcccctcgcctgcctgattcccttggagccccccaagacaggagatgggcagatgtcctctgaagtggcatgggctgcttgctcactggccttcccaggaccctgcccaggtggtgctgcttggccccaggtcgaattcctgtgctggcagcaagcaggggcctgggccgtcggctggctggggctcatgcagccatcccctttgcagccatccgggtgacctgcataggttcctgcggggtctccaacaaggctaatgacacagcgtgggtagtggaggagggttacttcaacagttccctgtcgctggcagacaagggtaagtttgggagccagttcccgagtggtgacccctgggggcagcccttggagtggggcctgtctgtcctgtcctccccctttcctagatctgcctcttggatctggcactggcccatcttgtcccagggttgtgggccctgatggctttctcataggcgctgggtggctgaaggggccacctcccccttgtgctggatttgggtgggctctgacccctggcacagctgtttcacccttgccccattcccaaaccactctcctgttcaagccaagctcttatcctcagtccttcacccaagccacagccctgtgctgctgtggcgctggtgactgagacagggagacccagtgtgagctggtcagctgcagtgcccactcttatcctggccctgtggccacctcaggccacctcagggggggactgccccccacctccctcctgtctctgcagggagcctgcccgctggagagcacagcttccccttccagttcctgcttcctggtgagagcccagcctggacaggcctggtgatgaccaactggtcctgggaggtgggctctgcagggtggaaggcagccaggtaccagtgcctgctctctccccagccactgcacccacgtcctttgagggtcctttcgggaagatcgtgcaccaggtgagggccgccatccacacgccacggttttccaaggatcacaagtgcagcctcgtgttctatatcttgagcccccacttcttggaccccgtcttcctctccaccaagagccattcgcagcggcagcccctgctggccaccttgagttctgtgcctggtgcgccggagccctgccctcaggatggcagccctgcctcacacccgctgcaccctcccttgtgcatttcaacaggtgccactgtcccctactttgcagagggctccggggggccagtgcccactaccagcaccttgattcttcctccagagtacagttcttggggctacccctatggtgagtcgacagccagggcttggcagggaggggacgccaagagccccacgcagaccctgctttcttcccgcagaggccccaccgtcttatgagcagagctgcggcggcgtggaacccagcctgacccctgagagctgaccccgtgctgccttctccaggcaggcctggcctctgccctgggactggggcgcccagggcctcgtgccttctctcttggcctagcctggcccactcaggacctgcccagcctctgccagctcctctggcatccgccctcttctccctggggctggggtgggggtggcagggagctgggacctggagagacaactcctgtaaataaaacactttatttgtagagctgggcctcaccggcctcgccttgggcaccctccagcctctggcagggcctgaccctgaccccatcctgggctctgctcatgccagggcagaccctgctcctcaggtgccccctactaccctgggggcgcgctcaggctaccatgcctgggcggagccgcggggctggctccctttaacagaggacgggggctggcgctgggccttccagagccgcctaaggacacgtccttggagcccggctcatgaaatggggcctcacgcaaccttggtgtttggttaaatttgtgccttggctcctgttgcgtttaggcacccaggttcccaagcggtgtggtgtggacctcccctgctgagaaacccgctggcgcgtggaggggcttgcccaggtccctccgacaggagaccctgctccctgggccttggcccctgctagcaccactgccaggcctggctctgagggacgctgcttctcccctgcccacgtctccaaggcctgaaaggcagggttctgtggaacagcatttctcaaaggggcatcctgcagacgttccagccccaggggaggccccgtgatgctggctggcctgcctggagggtgcttccagaaacaacggagatggtggtgaagaaggctctgggttcaaattccagttctcctttagggcgaaggggtgactgtggctaggtttgtcagttaccttatctataaaatgcacaggaccaggccgggcacggtggctccctcctgtaatcccagtactttgggaggctgaggcaggtggattgcttgaggtcaggagttccagatcagcctgggcaacatagtgaaactccatctgtacaaaaaaaaaaaa

SEQ ID NO: 41 - DNA, 1650 bp, Homo sapien
agggaccgtatttcaagtcctgccctcccaccagcgcctgcgccccgcagcagtgtccggctccctgccgacgccctggagctgggacggcctggggcgctggtcggccgccttcccccagaaggaggcgtgagcggggcgtggccggaacgtctctcttcggagccgcgccccgggcgggcacagttacgcgccgcacggatcatggccgcagccgctctggggcaggtgggttcgcagccccgcgccggggtctgggaaataaccgggggaggcgcacttccgggaagaccactggcctgcagccggtccgactcggcgccgctcctcccgccctggggttccgctgcagggcgcggaggaggatggcgccctttggaaaggagcacgaggctttaatggggtgcagctgtttgagggcatgaaggcgttcaaaggcaaagaccagcaggtgcgcctcttccgcccctggctcaacatggaccggatgctgcgctcagccatgcgcctgtgcctgccgagtttcgacaagctggagttgctggagtgcatccgccggctcatcgaagtggacaaggactgggtccccgatgccgccggcaccagcctctatgtgcggcctgtgctcattgggaacgagccctcgctgggtgtcagccagcccacgcgcgcgctcctgttcgtcattctctgcccagtgggtgcctacttccctggaggctccgtgaccccggtctccctcctggccgacccagccttcatccgggcctgggtgggcggggtcggcaactacaagttaggtgggaattatgggcccaccgtgttagtgcaacaggaggcactcaagcggggctgtgaacaggtcctctggctgtatgggcccgaccaccagctcaccgaggtgggaaccatgaacatctttgtctactggacccacgaagatggggtgctggagctggtgacgcccccgctgaatggtgttatcctgcctggagtggtcagacagagtctactggacatggctcagacctggggtgagttccgggtggtggagcgcacgatcaccatgaagcagttgctgcgggccctggaggagggccgcgtgcgggaagtctttggctcgggcaccgcttgccaggtctgcccagtgcaccgaatcctgtacaaagacaggaacctccacattcccaccatggaaaatgggcctgagctgatcctccgcttccagaaggagctgaaggagatccagtacggaatcagagcccacgagtggatgttcccggtgtgaagctgcaggctgtgctccagatccaccgacccgtagcatctcgtcacgccagcactcgcctccctaccaatgactcacctgaagtgcaatacgaaataaaaggccagcgggcggcgtctgggtctctggcgcccccatgtggttgcgacactcccaaagccgtaagggccgacccaggcatcttggcccccagcccctcgtcgcgggttcaggtccgcccattactccttgtcgtgcggtcaaggatacaccttggccccgattccggatctctccgttctcaggccagacccctggtgctgccgttgatttttttttctctgtctttgctgcaattttgaaataaaatgccaaagaacaca

SEQ ID NO: 42 - DNA, 2040 bp, Homo sapien
tccaaattgtttatttatatatacaaagaattatcagggttttccatggagtaaatgccccggataatcctctgaaggaagagcatttagtccaacttaatgaaaccgatatccttcgcgtactggacggaaacactggcggcacatatggaggccatattcccggatcagaccgtgccggtttgaacagacacgacaagagcgagaacccgggccgaatttacgcgggtggctccagtacagctgctggtgacccatctttgctctcagccgcacggatcatggccgcagccgctctggggcagatctgggcacgaaagcttctctctgtcccttggcttctgtgtggtcccagaagatatgcctcctccagtttcaaggctgcagacctgcagctggaaatgacacagaagcctcataagaagcctggccccggcgagcccctggtgtttgggaagacatttaccgaccacatgctgatggtggaatggaatgacaagggctggggccagccccgaatccagcccttccagaacctcacgctgcacccagcctcctccagcctccactactccctgcagctgtttgagggcatgaaggcgttcaaaggcaaagaccagcaggtgcgcctcttccgcccctggctcaacatggaccggatgctgcgctcagccatgcgcctgtgcctgccgagtttcgacaagctggagttgctggagtgcatccgccggctcatcgaagtggacaaggactgggtccccgatgccgccggcaccagcctctatgtgcggcctgtgctcattgggaacgagccctcgctgggtgtcagccagcccacgcgcgcgctcctgttcgtcattctctgcccagtgggtgcctacttccctggaggctccgtgaccccggtctccctcctggccgacccagccttcatccgggcctgggtgggcggggtcggcaactacaagttaggtgggaattatgggcccaccgtgttagtgcaacaggaggcactcaagcggggctgtgaacaggtcctctggctgtatgggcccgaccaccagctcaccgaggtgggaaccatgaacatctttgtctactggacccacgaagatggggtgctggagctggtgacgcccccgctgaatggtgttatcctgcctggagtggtcagacagagtctactggacatggctcagacctgggtgaggacatggcatcttctggtgatgggcgccatgtgccaggggccagggcatcagagggctgggactggggcacactggcatgtctctgccccttctcctgggtctgtctctcccgttgggcctctgtctttctcactatcctcagggagggagaggtggaggtctgcagcagggcaaccctctggggacacgtgtctctgccaactgccctgcagggtgagttccgggtggtggagcgcacgatcaccatgaagcagttgctgcgggccctggaggagggccgcgtgcgggaagtctttggctcgggcaccgcttgccaggtctgcccagtgcaccgaatcctgtacaaagacaggaacctccacattcccaccatggaaaatgggcctgagctgatcctccgcttccagaaggagctgaaggagatccagtacggaatcagagcccacgagtggatgttcccggtgtgaagctgcaggctgtgctccagatccaccgacccgtagcatctcgtcacgccagcactcgcctccctaccaatgactcacctgaagtgcaatacgaaataaaaggccagcgggcggcgtctgggtctctggcgcccccatgtggttgcgacactcccaaagccgtaagggccgacccaggcatcttggcccccagcccctcgtcgcgggttcaggtccgcccattactccttgtcgtgcggtcaaggatacaccttggccccgattccggatctctccgttctcaggccagacccctggtgctgccgttgatttttttttctctgtctttgctgcaattttgaaataaaatgccaaagaacaca

SEQ ID NO: 43 - DNA, 1191 bp, Homo sapien
tactcgtgtgttacagtgtgcccccagatgttctcccaattgcgtggcgttcactgcagctgtaacggtccctgcgtgcatttatgcgctctttggaccctgtgaacacaccgggatactggtaatcttgccccctatggagtacttatggcgctcccctgtgtttatttwtttkggtataaacccttwataascawtttaacwyacakaawagttcawagawwaagatcagaaagaatactgcttcatatgtcccaaaagagaaaaaaataaaggggacaatgccaacatgctcaacaataaaggcttctttttcttatttttttaatacaaaatacaagcaaaggatacacatacttaaaacagagctcaggagcagacacgcagtcctggaaacccttcaataaaagcaaagcaggagtttgttttttctttgtctatgcagatacatacagagactgggatatgtaaaaattaagtatcacaaaagaccatcacacgattctaccaatgcatgttgcatctgtaattcacgaacatggtcaacaaaatcatgttcacttcaaccccatttcatttaaattaaagaaaaaaaccttttaaataaagtggttacattcaaactttaacttccttagtaccatgctgcagatttcagcactgttaaggtattgcaagaatgcccaaccctctggtgtctgatcatgtatctagcaacattgcagtatgaagaaaagagatgccccggtctcagcccatggactagttaatacagtgaagcaggttcctgtcttttacccttcctgctcagaacataaaagattaaggactaaaatcaaggaagactgggagttttagagctggcaaaatgaagtctaaaagataaatcaaggcaaacaattactgagaacttggctgttgcttaacctggcaagtctaaaagcctttctttaaccttgtaggaattagatgcataaggtttgctgcaacatgttcatggtaaacaaactaagtagagctcttatttacaaatcttgtaacaaatacttctggaggaaaaagagaaaagaattcactaagttccagaagacaagcttaattgcagacgtatacaaacacacatcacacgtaacaccacacatattcgggtttttatacatgttattttagggcataagctgagtactatac

SEQ ID NO: 44 - DNA, 3097 bp, Homo sapien
gagcctacgtgacacgacgtgaagtggcaatggcggcggacgagggctgtgcccccggcccgccccgttaggagccgcgagtaaggcgagtgtccaacgccgagctggctgacagagcccggccgcggcctccgcgggcccaggggcctccaggccccgtgaccaccggaccgagcaccctggaacggccccagcttggcctcgggacagtccgcgcgctcaccgactccctggtgaacgccgcttggccgccgccgccgccgcaggacccacgagaagcggaaaccggcgcaaggacccggtccccccggcgccgtacgtggagtgagcctgcggctccgccccgcgcgctccgattggctctggggcctggcccgccccttcccgacactgtcattggcctaggcaaagccgtaagggtggggaatcctattggcccaggggtgcggcttgtcctctcccggtgctctcattggccgagcgcggccgttgggggtgaggccgcgtcgggggaggacaacaaagggccgcgggcggcgggcagtggtgtcccagtctcccggtgcttccctgaggctgaggcgcccggcctcccgcccgccgcgctccagatgaagtgtgagcactgcacgcgcaaggaatgtagtaagaaaacaaaaactgatgaccaagagaatgtgtcagccgatgcaccgagtccagcccaggaaaatggagagaagggagaattccacaagttggctgatgccaagatatttttgagcgactgcctggcatgtgacagctgtatgactgcagaggaaggagtccaactttcccagcaaaatgccaaggacttcttccgcgttctgaaccttaacaagaaatgtgatacctcaaagcacaaagtgctggtagtgtctgtgtgtcctcaatctttgccttattttgctgctaaattcaacctcagtgtaactgatgcatccagaagactctgtggtttcctcaaaagtcttggggtgcactatgtatttgatacgacgatagctgcggattttagtatcctggagagtcaaaaagaattcgtgcgtcgctatcgccagcacagtgaggaggaacgcaccctgcccatgctgacctctgcctgtcctggctgggtccgatacgccgagcgggtgctgggtcgccccatcactgcccacctctgcaccgccaagtccccccagcaggtcatgggctctttggtgaaggattatttcgccagacagcagaacctgtctccagagaagattttccacgtcattgtggccccttgttatgacaagaagctggaggctcttcaggaaagccttccccctgctttgcatggctcccggggcgctgactgcgtgttaacatcaggtgaaattgctcaaataatggagcaaggtgacctctcagtgagagatgctgccgtcgacactcttgtaagtggcttctctggggagagtcctctggggggcaggacctctcgtcagccctgccagccacctgccaggcccagggctgccctgctttatgacgaggccatgtgaagcactgcgatgcagtcccccaggcccctgccacaaccctcagccaccctatagctgttgaatgggataccattcaccagggctgccagggagttgaaggtttggcgggcttccatggtgtgattgccaccctaaacccttgaggaaggacaaaatgcacaaacagctttgtcctcgctggcgcagggctgttcatgtgtgcaccagcccccttcttcctgagtgccgtctgtgcctcacattccgtgtggtctatggggcagtggggcagctccctcaggcccctttgcaccaagagtggcagtctgggttctgctgggggcggtgacctcgatacccagcaaggcccagggctcctgctgcaccccaggcactgggcagagagcaccacaaaggcagcagcgtgtgtcctcgccaacagtccgcatcccaggtgctgcattcgtgcccttttgggggaaggtaagatagaagtttacagaatttaagcatctgtggggccaggcgtggtggctcacacctataatcacagtactttgggaggctgaggtaggaggatcacttgagtccaggaggctggggctgtagtgagctatgattgtgccactgcactccagcctgagagacagaacaagaccctgtctccaaaagaaaaagaccataagcatctggagcacctgcaagagcctgtgcatgggctcggcgtgactgagagtcctccgccttgcccgagcatcaggcaggccctcccaagacccctcaagatgctagaatgggactttctgcaaagtttaaacatctgtacaggatttagcttctttggtggcgaacttggattgtgatgccctcaggaagtctggtttcactctttctgtcactgtacgtcagcattcatgaaggacttgtattttctctgccttgtgaggtttggagacttgaaggaggacaaagtgacgcgtcatgatggagccagctcagacgggcacctggcacacatcttcagacatgcggccaaggagctgttcaacgaggatgtggaggagaaacaaagacttccaagaggtcacccttgagaagaacggagaggtggtgttacgctttgctgcagcctatggctttcgaaacatccagaacatgatcctgaagcttaagaagggcaagttcccattccactttgtggaggtcctcgcctgtgctggaggatgcttaaatggcagaggccaagcccagactccagacggacatgcggataaggccctgctgcggcagatggaaggcatttacgctgacatccctgtgcggcgtccggagtccagtgcacacgtgcaggagctgtaccaggagtggctggaggggatcaactcccccaaggcccgagaggtgctgcataccacgtaccagagccaggagcgtggcacacacagcctggacatcaagtggtgaagtcaggccagggccttccagctgctcttggggccagagccaagagcctctcagtagagggaggggctgccctgagtggagtattaaagacacttaagaaa

SEQ ID NO: 45 - DNA, 3709 bp, Homo sapien
gagcctacgtgacacgacgtgaagtggcaatggcggcggacgagggctgtgcccccggcccgccccgttaggagccgcgagtaaggcgagtgtccaacgccgagctggctgacagagcccggccgcggcctccgcgggcccaggggcctccaggccccgtgaccaccggaccgagcaccctggaacggccccagcttggcctcgggacagtccgcgcgctcaccgactccctggtgaacgccgcttggccgccgccgccgccgcaggacccacgagaagcggaaaccggcgcaaggacccggtccccccggcgccgtacgtggagtgagcctgcggctccgccccgcgcgctccgattggctctggggcctggcccgccccttcccgacactgtcattggcctaggcaaagccgtaagggtggggaatcctattggcccaggggtgcggcttgtcctctcccggtgctctcattggccgagcgcggccgttgggggtgaggccgcgtcgggggaggacaacaaagggccgcgggcggcgggcagtggtgtcccagtctcccggtgcttccctgaggctgaggcgcccggcctcccgcccgccgcgctccagatgaagtgtgagcactgcacgcgcaaggaatgtagtaagaaaacaaaaactgatgaccaagagaatgtgtcagccgatgcaccgagtccagcccaggaaaatggagagaagggagaattccacaagttggctgatgccaagatatttttgagcgactgcctggcatgtgacagctgtatgactgcagaggaaggagtccaactttcccagcaaaatgccaaggacttcttccgcgttctgaaccttaacaagaaatgtgatacctcaaagcacaaagtgctggtagtgtctgtgtgtcctcaatctttgccttattttgctgctaaattcaacctcagtgtaactgatgcatccagaagactctgtggtttcctcaaaagtcttggggtgcactatgtatttgatacgacgatagctgcggattttagtatcctggagagtcaaaaagaattcgtgcgtcgctatcgccagcacagtgaggaggaacgcaccctgcccatgctgacctctgcctgtcctggctgggtccgatacgccgagcgggtgctgggtcgccccatcactgcccacctctgcaccgccaagtccccccagcaggtcatgggctctttggtgaaggattatttcgccagacagcaggtaagctgacctctctggagggcaggaagggcaggtgagggaggaccatggcacaggggcccaggaaggggaggttccccatctgtccagcgtggtcacggccccccaggtgagcaaaaaggaagctgtggcttcaggaaacatcagcagtgctgtttctcaccaacgcccgtctctattcctcccttcctcttacaacctttttctttcttcttaaccttttctgtggcatctggtggttttcctgggcccattcggggtagagtagaaatgctgcccaccctgctgagaatgaggccccggaccttgcccagagatgctgcctgcctgctgttgggatgcctcacccaaggaggcctaaagtggcctgtgcctggaggctgagggcagctgtcatttagggagccaaacctggcctctgccctggcctttccctcagaccacgggcatcacatgacttccttagccacttctgtgagattccacagtggccatgatgctgtcctcctcttgatggagtgagtcccggcctgaggctcctgcgtgccccctgcctcggcccgtcgtgttctcccttcccacaaccctctgcggcccccaggtcctcccagaactccctgatgtctccaaggccaccctcaaagggaccctaatcccatggtttattctccagccgctggcatgccccacactgctcttctcaatcagactttacacctccctccggggaagcagccatgtccaggcactgtggtaactggagtagagggtaacatcaggatctttcagacatttgaagtcagcctaaaaaggcacgcacatttggcagccttgttattttagcaataggcagtgttttccttctatctagtttctttctacccataaagtcataatttggcaaattataaacatgatgtcagagtatacacgttcagtttaggcaggaccgaaaaatgagctatgggactttctgtcccttgccctgcccccacctgaagagagccatgtgtttctaggtcttccacgtgctgccctctcccctggatggagcccagagctatgtgtcctcctgtaggtgccatgaggggcagccgcagagacccggcctccagcagcctctcacctgaccacctggcacagctgcaaccaggggcgggtttcctcttttgctccgcccctgccctgagtgggtcctttccacccagacctcaccacagggtcacttggcaactgctggctcctggctttgccaccagttcaggcccagccacaggcacctgctctgtgtggacccaggagaggggtagcttgggtgggcatcgcttgggaagattcaggaaagtctgtgggtgaagtagccagcgcgcacacacacacacacacacacacactcactcaggcctcctgcaatggctccatgctggaccagcaacagctccacgccggctggacttcctcttacttgttttgtccccatgtgcacaggttcaggaggaaatgggctcagccttcccggttcttccaggaggctccactggctggggggctttgcagatgtttgggaggaccacacccagtcctgagggaggcagcagacagacatggatggagtgctggtgctcgaacctgtctccagagaagattttccacgtcattgtggccccttgttatgacaagaagctggaggctcttcaggaaagccttccccctgctttgcatggctcccggggcgctgactgcgtgttaacatcaggtgaaattgctcaaataatggagcaaggtgacctctcagtgagagatgctgccgtcgacactctgtttggagacttgaaggaggacaaagtgacgcgtcatgatggagccagctcagacgggcacctggcacacatcttcagacatgcggccaaggagctgttcaacgaggatgtggaggaggtcacttaccgagccctgagaaacaaagacttccaagaggtcacccttgagaagaacggagaggtggtgttacgctttgctgcagcctatggctttcgaaacatccagaacatgatcctgaagcttaagaagggcaagttcccattccactttgtggaggtcctcgcctgtgctggaggatgcttaaatggcagaggccaagcccagactccagacggacatgcggataaggccctgctgcggcagatggaaggcatttacgctgacatccctgtgcggcgtccggagtccagtgcacacgtgcaggagctgtaccaggagtggctggaggggatcaactcccccaaggcccgagaggtgctgcataccacgtaccagagccaggagcgtggcacacacagcctggacatcaagtggtgaagtcaggccagggccttccagctgctcttggggccagagccaagagcctctcagtagagggaggggctgccctgagtggagtattaaagacacttaagaaa

SEQ ID NO: 46 - DNA, 1840 bp, Homo sapien
cgcattctcctctctgctaagctttctcatgctagagaatgatgactaaaaaacagatgatcccatcttcttattcaccatcccctaaaaaaaacagactgccacgtggaatgtgtcagcctcacctgggggagacacccttatctgacgacttaaaaggaaaaacttggtgagccagcctccacacaaacacacgcatagccttgcacaaaacaaaaatttattgggagaaagatggctgatgggaggcaagatctggattcaggaatcctcaattttagctctcgctctgtcaccaaaaccctccgtccctcccagagcctcgaggagtttccccttgtgtaaaccggtatcgcgtcccttccagctctgacatcctgcggttctagaatacccattgattgaaagagctgtggccaaacaggaaggacagagtaagagccgctgacaaaggattctgccaagacagaatcccaaggtcacaggagagaggcttggggcagtgaaagccctctcgggtcttggctttggaagtgtggactgtaccagcagatgggcccttgggaagccaacagggaacaattcaaggctggagagaaaaggccacctttgacccagcagaaggcagaggcgggagaggagggtgaggatgtacaaggagcatcgcaggcgaggaaacaatggccaggacctaactgtggtgggaactgcctttgtctccacacactcgcaatcaacatgcgtatttgctattctcaaacaactcccttccacccccttaggctgaaaggacaaactcatcagagttgaggagtacctacctgatgaagctgttcatgcttccagcatcaaactggacgtttactgtctgcccaaaagccagtttccaaaaggtttgcttccctctgttcagtggattcttgactacatataggtcatatatttcaaaaaataatgcctagctatttctactttgaaatcatgactaaagccaaaccacaaccacagcaaagataacctaaggatttgtttaccagaaatacctacaaaaaagtttgcaggccgggcgcgatggctcacacttgtaatcccagcactttgagaggccgagatgggcagatcacctgaggtcaggggttcaagaccatcctgcccaacatgatgaaacctggtctctactaaaaatacaaaaattaaccgggtgtggtggcgcatgcctgtaatcccagctactcaggagactgaggcggaattgccagaaccctggagggcagaggttgcagtaagctgagatcgggccactgcactccagcctgggtgacagaatgagactcagtctcccaccctgccaaaaagtttgcaatgtcggcagcaaagtgcaaacagagccggctctgggtgaaagctttagttatgaaaaataagaaaaaaaaaatccctaagcatttcttaacactagttttaaagaaaaccccctctccaaaggtatgtttctccttcaactttcttgactttgccaggctgtcaggatgcaagctacctactcttttctggatggatcgggacaaagtttttaaacaaagactgtgtcctctccacaagcccttcccaccaccaccaccccagccccccgccgccataattacaggggctgtgaaatggctgttgagtgatggtcacacaaccagaaggcagatgaaaaggtcaggctctaagaggggttcagcctcccagtaccagcctgctgtgcccaggggtgggagtgctgggagaactgtcttccccagacaggcagctatgccgcctcccactgcaaaggcaccaaaggcaacatccgtcc

SEQ ID NO: 47 - DNA, 1618 bp, Homo sapien
cgtcgacgggatggagggttttggtgacagagcgagagctaaaattgaggattcctgaatccagatcttgcctcccatcagccatctttctcccagagcctcgaggagtttccccttgtgtaaaccggtatcgcgtcccttccagctctgacatcctgcggttctagaatacccattgattgaaagagctgtggccaaacaggaaggacagagtaagagccgctgacaaaggattctgccaagacagaatcccaaggtcacaggagagaggcttggggcagtgaaagccctctcgggtcttggctttggaagtgtggactgtaccagcagatgggcccttgggaagccaacagggaacaattcaaggctggagagaaaaggccacctttgacccagcagaaggcagaggcgggagaggagggtgaggatgtacaaggagcatcgcaggcgaggaaacaatggccaggacctaactgtggtgggaactgcctttgtctccacacactcgcaatcaacatgcgtatttgctattctcaaacaactcccttccacccccttaggctgaaaggacaaactcatcagagttgaggagtacctacctgatgaagctgttcatgcttccagcatcaaactggacgtttactgtctgcccaaaagccagtttccaaaaggtttgcttccctctgttcagtggattcttgactacatataggtcatatatttcaaaaaataatgcctagctatttctactttgaaatcatgactaaagccaaaccacaaccacagcaaagataacctaaggatttgtttaccagaaatacctacaaaaaagtttgcaggccgggcgcgatggctcacacttgtaatcccagcactttgagaggccgagatgggcagatcacctgaggtcaggggttcaagaccatcctgcccaacatgatgaaacctggtctctactaaaaatacaaaaattaaccgggtgtggtggcgcatgcctgtaatcccagctactcaggagactgaggcggaattgccagaaccctggagggcagaggttgcagtaagctgagatcgggccactgcactccagcctgggtgacagaatgagactcagtctcccaccctgccaaaaagtttgcaatgtcggcagcaaagtgcaaacagagccggctctgggtgaaagctttagttatgaaaaataagaaaaaaaaaatccctaagcatttcttaacactagttttaaagaaaaccccctctccaaaggtatgtttctccttcaactttcttgactttgccaggctgtcaggatgcaagctacctactcttttctggatggatcgggacaaagtttttaaacaaagactgtgtcctctccacaagcccttcccaccaccaccaccccagccccccgccgccataattacaggggctgtgaaatggctgttgagtgatggtcacacaaccagaaggcagatgaaaaggtcaggctctaagaggggttcagcctcccagtaccagcctgctgtgcccaggggtgggagtgctgggagaactgtcttccccagacaggcagctatgccgcctcccactgcaaaggcaccaaaggcaacatccgtcc

SEQ ID NO: 48 - DNA, 3252 bp, Homo sapien
agggggctctgggcagacgtaggcgccgggctgcaccttccctgcccgcctgtttgcacttctctgtgactgttggcttcaggtccttagccagcggagggctgactccggcctggctgccccctcccctttgcctcccgtccctccccctggacactccaacccccatcccttcgtgtccctccccctcctctctctatgctactccctagccagaccccccgctcttccccggaacaatggaggggaatgtggctaggccagcctgacgctgctgcgtcaacctctggctcgttctcggcctctatcgcttccagggacccttctatctgggctcagctgacccgccccgcctctcggcccacgtgccggcagttctcccaggctggggctcagctgcgctggagactgggatgggtcagctcagtgtctctgtctgtttacaaaggaggaacccaggtgcactaagcaggccccccagtcctgggtgcaggcttgtgacagctgctcagggatccaaacgtggcgcttgagctctctgcgatgtgttccacagttccctggaggcggacactgcgtgagggtcagccatgtcatctgagcctcccccaccaccacagccccccacccatcaagcttcagtcgggctgctggacacccctcggagccgtgagcgctcaccatcccctctgcgcggcaacgtggtcccaagcccactgcccactcgccggacgaggaccttctcggcgacggtgcgggcttcacagggccccgtctacaaaggagtctgcaaatgcttctgccggtccaagggccatggcttcattaccccagctgatggcggccccgacatcttcctgcacatctctgatgtggaaggggagtatgtcccagtggaaggcgacgaggtcacctataaaatgtgctccatcccacccaagaatgagaagctgcaggccgtggaggtcgtcatcactcacctggcaccaggcaccaagcatgagacctggtctggacatgtcatcagctcctaggagatggtggaagcaccccttgtcctgtgcttgtgggagactttgcggggaggaggcagcagacactggagatgacattcttccacacgagacggggcttcagccgggcatggtccctctcaagtatctcctggaggaaggggtatggggggcaggtgtggggtgtggggtgttcccggccatcagcacagcctatgaccattgcaacaacctctcaccatctgaagagcattaaaagcatttaaaaaggagaggtgcccactggtggctgagtggaggttccaaccccatcccagggagtggatcaagggtggtatttctccagctgctcagacacatgggctcaacccacagaatccctcttcctcctggagctggaggccccagattcccagatctggccccctggcagcctgacagggaccttgcgtgacttctccaaggcaaatttccacctaagtgccccttgcgcctctcctggggcctgggcaaagcagttttctaattcttggcttggttggttctaggggagctggcttgaagtgggtggggaaaggcgggggtggcggtctttggattggacggatgttgccttttggtgcctttgcagtgggaggcggcatagctgcctgtctggggaagacagttctcccagcactcccacccctgggcacagcaggctggtactgggaggctgaacccctcttagagcctgaccttttcatctgccttctggttgtgtgaccatcactcaacagccatttcacagcccctgtaattatggcggcggggggctggggtggtggtggtgggaagggcttgtggagaggacacagtctttgtttaaaaactttgtcccgatccatccagaaaagagtaggtagcttgcatcctgacagcctggcaaagtcaagaaagttgaaggagaaacatacctttggagagggggttttctttaaaactagtgttaagaaatgcttagggattttttttttcttatttttcataactaaagctttcacccagagccggctctgtttgcactttgctgccgacattgcaaactttttggcagggtgggagactgagtctcattctgtcacccaggctggagtgcagtggcccgatctcagcttactgcaacctctgccctccagggttctggcaattccgcctcagtctcctgagtagctgggattacaggcatgcgccaccacacccggttaatttttgtatttttagtagagaccaggtttcatcatgttgggcaggatggtcttgaacccctgacctcaggtgatctgcccatctcggcctctcaaagtgctgggattacaagtgtgagccatcgcgcccggcctgcaaacttttttgtaggtatttctggtaaacaaatccttaggttatctttgctgtggttgtggtttggctttagtcatgatttcaaagtagaaatagctaggcattattttttgaaatatatgacctatatgtagtcaagaatccactgaacagagggaagcaaaccttttggaaactggcttttgggcagacagtaaacgtccagtttgatgctggaagcatgaacagcttcatcaggtaggtactcctcaactctgatgagtttgtcctttcagcctaagggggtggaagggagttgtttgagaatagcaaatacgcatgttgattgcgagtgtgtggagacaaaggcagttcccaccacagttaggtcctggccagtttgtttcctcgcctgcgatgctccttgtacgtcctcaccctcctctcccgcctctgccttctgctgggtcaaaggtggcctttttctctccagccttgaattgttccctgttggcttcccaagggcccatctgctggtacagtccacacttccaaagccaagacccgagagggctttcactgccccaagcctctctcctgtgaccttgggattctgtcttggcagaatcctttgtcagcggctcttgctctgtccttcctgtttggccacagctctttcaatcaatgggtattctagaaccgcaggatgtcagagctggaagggacgcgataccggtttacacaaggggaaactcctcgaggctctgggagggacggagggttttggtgacagagcgagagctaaaattgaggattcctgaatccagatcttgcctcccatcagccatctttctcccaataaatttttgttttgtgc

SEQ ID NO: 49 - DNA, 3014 bp, Homo sapien
ggtcatgcgggtgccctggcccccaggccagcagctggggcctttttgaggtgggggctccccggactcaggagttcctccttggccgcggctgtagctgagagaagggacaggaggtaggatgccacctcctccagaagcgtggtgacccgggctgtgtggaaattcactgggcctgatggagctggatgcagccttggaaattctccctttccctttgggctcccgcagcaggccccccagtcctgggtgcaggcttgtgacagctgctcagggatccaaacgtggcgcttgagctctctgcgatgtgttccacagttccctggaggcggacactgcgtgagggtcagccatgtcatctgagcctcccccaccaccacagccccccacccatcaagcttcagtcgggctgctggacacccctcggagccgtgagcgctcaccatcccctctgcgcggcaacgtggtcccaagcccactgcccactcgccggacgaggaccttctcggcgacggtgcgggcttcacagggccccgtctacaaaggagtctgcaaatgcttctgccggtccaagggccatggcttcattaccccagctgatggcggccccgacatcttcctgcacatctctgatgtggaaggggagtatgtcccagtggaaggcgacgaggtcacctataaaatgtgctccatcccacccaagaatgagaagctgcaggccgtggaggtcgtcatcactcacctggcaccaggcaccaagcatgagacctggtctggacatgtcatcagctcctaggagatggtggaagcaccccttgtcctgtgcttgtgggagactttgcggggaggaggcagcagacactggagatgacattcttccacacgagacggggcttcagccgggcatggtccctctcaagtatctcctggaggaaggggtatggggggcaggtgtggggtgtggggtgttcccggccatcagcacagcctatgaccattgcaacaacctctcaccatctgaagagcattaaaagcatttaaaaaggagaggtgcccactggtggctgagtggaggttccaaccccatcccagggagtggatcaagggtggtatttctccagctgctcagacacatgggctcaacccacagaatccctcttcctcctggagctggaggccccagattcccagatctggccccctggcagcctgacagggaccttgcgtgacttctccaaggcaaatttccacctaagtgccccttgcgcctctcctggggcctgggcaaagcagttttctaattcttggcttggttggttctaggggagctggcttgaagtgggtggggaaaggcgggggtggcggtctttggattggacggatgttgccttttggtgcctttgcagtgggaggcggcatagctgcctgtctggggaagacagttctcccagcactcccacccctgggcacagcaggctggtactgggaggctgaacccctcttagagcctgaccttttcatctgccttctggttgtgtgaccatcactcaacagccatttcacagcccctgtaattatggcggcggggggctggggtggtggtggtgggaagggcttgtggagaggacacagtctttgtttaaaaactttgtcccgatccatccagaaaagagtaggtagcttgcatcctgacagcctggcaaagtcaagaaagttgaaggagaaacatacctttggagagggggttttctttaaaactagtgttaagaaatgcttagggattttttttttcttatttttcataactaaagctttcacccagagccggctctgtttgcactttgctgccgacattgcaaactttttggcagggtgggagactgagtctcattctgtcacccaggctggagtgcagtggcccgatctcagcttactgcaacctctgccctccagggttctggcaattccgcctcagtctcctgagtagctgggattacaggcatgcgccaccacacccggttaatttttgtatttttagtagagaccaggtttcatcatgttgggcaggatggtcttgaacccctgacctcaggtgatctgcccatctcggcctctcaaagtgctgggattacaagtgtgagccatcgcgcccggcctgcaaacttttttgtaggtatttctggtaaacaaatccttaggttatctttgctgtggttgtggtttggctttagtcatgatttcaaagtagaaatagctaggcattattttttgaaatatatgacctatatgtagtcaagaatccactgaacagagggaagcaaaccttttggaaactggcttttgggcagacagtaaacgtccagtttgatgctggaagcatgaacagcttcatcaggtaggtactcctcaactctgatgagtttgtcctttcagcctaagggggtggaagggagttgtttgagaatagcaaatacgcatgttgattgcgagtgtgtggagacaaaggcagttcccaccacagttaggtcctggccagtttgtttcctcgcctgcgatgctccttgtacgtcctcaccctcctctcccgcctctgccttctgctgggtcaaaggtggcctttttctctccagccttgaattgttccctgttggcttcccaagggcccatctgctggtacagtccacacttccaaagccaagacccgagagggctttcactgccccaagcctctctcctgtgaccttgggattctgtcttggcagaatcctttgtcagcggctcttgctctgtccttcctgtttggccacagctctttcaatcaatgggtattctagaaccgcaggatgtcagagctggaagggacgcgataccggtttacacaaggggaaactcctcgaggctctgggagggacggagggttttggtgacagagcgagagctaaaattgaggattcctgaatccagatcttgcctcccatcagccatctttctcccaataaatttttgttttgtgc

SEQ ID NO: 50 - DNA, 2716 bp, Homo sapien
gctcaggaccggtcggaattccgggggcggacagaacggattgcagggtcagccatgtcatctgagcctcccccaccaccacagccccccacccatcaagcttcagtcgggctgctggacacccctcggagccgtgagcgctcaccatcccctctgcgcggcaacgtggtcccaagcccactgcccactcgccggacgaggaccttctcggcgacggtgcgggcttcacagggccccgtctacaaaggagtctgcaaatgcttctgccggtccaagggccatggcttcattaccccagctgatggcggccccgacatcttcctgcacatctctgatgtggaaggggagtatgtcccagtggaaggcgacgaggtcacctataaaatgtgctccatcccacccaagaatgagaagctgcaggccgtggaggtcgtcatcactcacctggcaccaggcaccaagcatgagacctggtctggacatgtcatcagctcctaggagatggtggaagcaccccttgtcctgtgcttgtgggagactttgcggggaggaggcagcagacactggagatgacattcttccacacgagacggggcttcagccgggcatggtccctctcaagtatctcctggaggaaggggtatggggggcaggtgtggggtgtggggtgttcccggccatcagcacagcctatgaccattgcaacaacctctcaccatctgaagagcattaaaagcatttaaaaaggagaggtgcccactggtggctgagtggaggttccaaccccatcccagggagtggatcaagggtggtatttctccagctgctcagacacatgggctcaacccacagaatccctcttcctcctggagctggaggccccagattcccagatctggccccctggcagcctgacagggaccttgcgtgacttctccaaggcaaatttccacctaagtgccccttgcgcctctcctggggcctgggcaaagcagttttctaattcttggcttggttggttctaggggagctggcttgaagtgggtggggaaaggcgggggtggcggtctttggattggacggatgttgccttttggtgcctttgcagtgggaggcggcatagctgcctgtctggggaagacagttctcccagcactcccacccctgggcacagcaggctggtactgggaggctgaacccctcttagagcctgaccttttcatctgccttctggttgtgtgaccatcactcaacagccatttcacagcccctgtaattatggcggcggggggctggggtggtggtggtgggaagggcttgtggagaggacacagtctttgtttaaaaactttgtcccgatccatccagaaaagagtaggtagcttgcatcctgacagcctggcaaagtcaagaaagttgaaggagaaacatacctttggagagggggttttctttaaaactagtgttaagaaatgcttagggattttttttttcttatttttcataactaaagctttcacccagagccggctctgtttgcactttgctgccgacattgcaaactttttggcagggtgggagactgagtctcattctgtcacccaggctggagtgcagtggcccgatctcagcttactgcaacctctgccctccagggttctggcaattccgcctcagtctcctgagtagctgggattacaggcatgcgccaccacacccggttaatttttgtatttttagtagagaccaggtttcatcatgttgggcaggatggtcttgaacccctgacctcaggtgatctgcccatctcggcctctcaaagtgctgggattacaagtgtgagccatcgcgcccggcctgcaaacttttttgtaggtatttctggtaaacaaatccttaggttatctttgctgtggttgtggtttggctttagtcatgatttcaaagtagaaatagctaggcattattttttgaaatatatgacctatatgtagtcaagaatccactgaacagagggaagcaaaccttttggaaactggcttttgggcagacagtaaacgtccagtttgatgctggaagcatgaacagcttcatcaggtaggtactcctcaactctgatgagtttgtcctttcagcctaagggggtggaagggagttgtttgagaatagcaaatacgcatgttgattgcgagtgtgtggagacaaaggcagttcccaccacagttaggtcctggccagtttgtttcctcgcctgcgatgctccttgtacgtcctcaccctcctctcccgcctctgccttctgctgggtcaaaggtggcctttttctctccagccttgaattgttccctgttggcttcccaagggcccatctgctggtacagtccacacttccaaagccaagacccgagagggctttcactgccccaagcctctctcctgtgaccttgggattctgtcttggcagaatcctttgtcagcggctcttgctctgtccttcctgtttggccacagctctttcaatcaatgggtattctagaaccgcaggatgtcagagctggaagggacgcgataccggtttacacaaggggaaactcctcgaggctctgggagggacggagggttttggtgacagagcgagagctaaaattgaggattcctgaatccagatcttgcctcccatcagccatctttctcccaataaatttttgttttgtgc

SEQ ID NO: 51 - DNA, 3539 bp, Homo sapien
caatgagaagacttactttcctggtaggcagcctgctttgttttgcacaggaagatagattttttttctcatctttcttataaacaacctcatgcacattctgtgtttgagccaagactagtcgaattcgaattcgaattcgaagcggctggcggacagaacggattgcagggtcagccatgtcatctgagcctcccccaccaccacagccccccacccatcaagcttcagtcgggctgctggacacccctcggagccgtgagcgctcaccatcccctctgcgcggcaacgtggtcccaagcccactgcccactcgccggacgaggaccttctcggcgtgagtctggagcaggctggggacgcgttctcagatggatctcttgcctgaggccagagattcactgtgtctctggccatttttgggcctatgtcccggactgccaaataggcagacctggggctgggccgtgggctgagggtgagaaactaggaaggcgccttgtaaattcagggtactgcccagcccagaagaacctgttaccagctgggagtggcaatgggtgggcagttgctggggtcagaatcgctgggctttaaccacacatgagagtctggttccctgtgagactgtgaattctgcagctgcaaaatgggcacagcaccagggctgcaaaggacccacataatgcctggcagatgcaggtctcaggccttgcgagtggaggatgcttgtgttattaatagtaaatcattagtttctggagggatgttcagtgatgttttagttcaactccctctttccaggagggaaaacaggcccgagaaaattggccagggtcacccaaagagtcctttcccccagcgtctttgtgagcggctcccagggttgagggttgtgcagtcctcagcctgtgtgactgtacatggcggtcctggccagggcttgatggggcacagctgtgggcaggggctggaatgagctttgtgtgcccaggagcgctgatggggcccctgacatttccccctctctgtcaggacggtgcgggcttcacagggccccgtctacaaaggagtctgcaaatgcttctgccggtccaagggccatggcttcattaccccagctgatggcggccccgacatcttcctgcacatctctgatgtggaaggggagtatgtcccagtggaaggcgacgaggtcacctataaaatgtgctccatcccacccaagaatgagaagctgcaggccgtggaggtcgtcatcactcacctggcaccaggcaccaagcatgagacctggtctggacatgtcatcagctcctaggagatggtggaagcaccccttgtcctgtgcttgtgggagactttgcggggaggaggcagcagacactggagatgacattcttccacacgagacggggcttcagccgggcatggtccctctcaagtatctcctggaggaaggggtatggggggcaggtgtggggtgtggggtgttcccggccatcagcacagcctatgaccattgcaacaacctctcaccatctgaagagcattaaaagcatttaaaaaggagaggtgcccactggtggctgagtggaggttccaaccccatcccagggagtggatcaagggtggtatttctccagctgctcagacacatgggctcaacccacagaatccctcttcctcctggagctggaggccccagattcccagatctggccccctggcagcctgacagggaccttgcgtgacttctccaaggcaaatttccacctaagtgccccttgcgcctctcctggggcctgggcaaagcagttttctaattcttggcttggttggttctaggggagctggcttgaagtgggtggggaaaggcgggggtggcggtctttggattggacggatgttgccttttggtgcctttgcagtgggaggcggcatagctgcctgtctggggaagacagttctcccagcactcccacccctgggcacagcaggctggtactgggaggctgaacccctcttagagcctgaccttttcatctgccttctggttgtgtgaccatcactcaacagccatttcacagcccctgtaattatggcggcggggggctggggtggtggtggtgggaagggcttgtggagaggacacagtctttgtttaaaaactttgtcccgatccatccagaaaagagtaggtagcttgcatcctgacagcctggcaaagtcaagaaagttgaaggagaaacatacctttggagagggggttttctttaaaactagtgttaagaaatgcttagggattttttttttcttatttttcataactaaagctttcacccagagccggctctgtttgcactttgctgccgacattgcaaactttttggcagggtgggagactgagtctcattctgtcacccaggctggagtgcagtggcccgatctcagcttactgcaacctctgccctccagggttctggcaattccgcctcagtctcctgagtagctgggattacaggcatgcgccaccacacccggttaatttttgtatttttagtagagaccaggtttcatcatgttgggcaggatggtcttgaacccctgacctcaggtgatctgcccatctcggcctctcaaagtgctgggattacaagtgtgagccatcgcgcccggcctgcaaacttttttgtaggtatttctggtaaacaaatccttaggttatctttgctgtggttgtggtttggctttagtcatgatttcaaagtagaaatagctaggcattattttttgaaatatatgacctatatgtagtcaagaatccactgaacagagggaagcaaaccttttggaaactggcttttgggcagacagtaaacgtccagtttgatgctggaagcatgaacagcttcatcaggtaggtactcctcaactctgatgagtttgtcctttcagcctaagggggtggaagggagttgtttgagaatagcaaatacgcatgttgattgcgagtgtgtggagacaaaggcagttcccaccacagttaggtcctggccagtttgtttcctcgcctgcgatgctccttgtacgtcctcaccctcctctcccgcctctgccttctgctgggtcaaaggtggcctttttctctccagccttgaattgttccctgttggcttcccaagggcccatctgctggtacagtccacacttccaaagccaagacccgagagggctttcactgccccaagcctctctcctgtgaccttgggattctgtcttggcagaatcctttgtcagcggctcttgctctgtccttcctgtttggccacagctctttcaatcaatgggtattctagaaccgcaggatgtcagagctggaagggacgcgataccggtttacacaaggggaaactcctcgaggctctgggagggacggagggttttggtgacagagcgagagctaaaattgaggattcctgaatccagatcttgcctcccatcagccatctttctcccaataaatttttgttttgtgc

SEQ ID NO: 52 - DNA, 2810 bp, Homo sapien
caaggaattttagggcggacgtcgggtagtctttcccgcctgcccacctgttctctgcgtgcaggggaagctcttcccgccctccccgctgcttttgcctttgggcgggagccctggacgggggactcgccgggcggtggggcgaggcgcggggggcgtcgcacgcgggaagcagagccaccccccgccgggcctggccgcgccagctgtggctcgaggttgggacgtcagccatgtcatctgagcctcccccaccaccacagccccccacccatcaagcttcagtcgggctgctggacacccctcggagccgtgagcgctcaccatccccgtctacaaaggagtctgcaaatgcttctgccggtccaagggccatggcttcattaccccagctgatggcggccccgacatcttcctgcacatctctgatgtggaaggggagtatgtcccagtggaaggcgacgaggtcacctataaaatgtgctccatcccacccaagaatgagaagctgcaggccgtggaggtcgtcatcactcacctggcaccaggcaccaagcatgagacctggtctggacatgtcatcagctcctaggagatggtggaagcaccccttgtcctgtgcttgtgggagactttgcggggaggaggcagcagacactggagatgacattcttccacacgagacggggcttcagccgggcatggtccctctcaagtatctcctggaggaaggggtatggggggcaggtgtggggtgtggggtgttcccggccatcagcacagcctatgaccattgcaacaacctctcaccatctgaagagcattaaaagcatttaaaaaggagaggtgcccactggtggctgagtggaggttccaaccccatcccagggagtggatcaagggtggtatttctccagctgctcagacacatgggctcaacccacagaatccctcttcctcctggagctggaggccccagattcccagatctggccccctggcagcctgacagggaccttgcgtgacttctccaaggcaaatttccacctaagtgccccttgcgcctctcctggggcctgggcaaagcagttttctaattcttggcttggttggttctaggggagctggcttgaagtgggtggggaaaggcgggggtggcggtctttggattggacggatgttgccttttggtgcctttgcagtgggaggcggcatagctgcctgtctggggaagacagttctcccagcactcccacccctgggcacagcaggctggtactgggaggctgaacccctcttagagcctgaccttttcatctgccttctggttgtgtgaccatcactcaacagccatttcacagcccctgtaattatggcggcggggggctggggtggtggtggtgggaagggcttgtggagaggacacagtctttgtttaaaaactttgtcccgatccatccagaaaagagtaggtagcttgcatcctgacagcctggcaaagtcaagaaagttgaaggagaaacatacctttggagagggggttttctttaaaactagtgttaagaaatgcttagggattttttttttcttatttttcataactaaagctttcacccagagccggctctgtttgcactttgctgccgacattgcaaactttttggcagggtgggagactgagtctcattctgtcacccaggctggagtgcagtggcccgatctcagcttactgcaacctctgccctccagggttctggcaattccgcctcagtctcctgagtagctgggattacaggcatgcgccaccacacccggttaatttttgtatttttagtagagaccaggtttcatcatgttgggcaggatggtcttgaacccctgacctcaggtgatctgcccatctcggcctctcaaagtgctgggattacaagtgtgagccatcgcgcccggcctgcaaacttttttgtaggtatttctggtaaacaaatccttaggttatctttgctgtggttgtggtttggctttagtcatgatttcaaagtagaaatagctaggcattattttttgaaatatatgacctatatgtagtcaagaatccactgaacagagggaagcaaaccttttggaaactggcttttgggcagacagtaaacgtccagtttgatgctggaagcatgaacagcttcatcaggtaggtactcctcaactctgatgagtttgtcctttcagcctaagggggtggaagggagttgtttgagaatagcaaatacgcatgttgattgcgagtgtgtggagacaaaggcagttcccaccacagttaggtcctggccagtttgtttcctcgcctgcgatgctccttgtacgtcctcaccctcctctcccgcctctgccttctgctgggtcaaaggtggcctttttctctccagccttgaattgttccctgttggcttcccaagggcccatctgctggtacagtccacacttccaaagccaagacccgagagggctttcactgccccaagcctctctcctgtgaccttgggattctgtcttggcagaatcctttgtcagcggctcttgctctgtccttcctgtttggccacagctctttcaatcaatgggtattctagaaccgcaggatgtcagagctggaagggacgcgataccggtttacacaaggggaaactcctcgaggctctgggagggacggagggttttggtgacagagcgagagctaaaattgaggattcctgaatccagatcttgcctcccatcagccatctttctcccaataaatttttgttttgtgc

SEQ ID NO: 53 - DNA, 4725 bp, Homo sapien
aatttgaaaaccccatgggacctgagtcaaaccgatccagggctgctgctgtccctcccggctgtgtggtgttgagtggcgtcctgagttaggcttctccctacttcatctcatacccccatcaccagccctgcgcaggtgccaagtgatgcccacccagctgccccactttgcagattcggaaactgagcccagagatgggaaaggacttacccaagggcctctgactgctggactgtttctctttcccctgaacctcgagctgaggccacgttagagccgacaccttcatattcaatgttcagtgattattgtgtacagcgagtgtcctgctcttgaaaaattgtcaaaagcacagcagcagctagggaattcccgccctccagctggatttaccggtacatactaggggtcacagaaggaatttgatttcataacagcgtggtgacccgggctgtgtggaaattcactgggcctgatggagctggatgcagccttggaaattctccctttccctttgggctcccgcagcaggccccccagtcctgggtgcaggcttgtgacagctgctcagggatccaaacgtggcgcttgagctctctgcgatgtgttccacagttccctggaggcggacactgcgtgagggtcagtttttgcccctgcttccctgtggtgtctggctcccagcagcgtcagggagggtccgtggagtggctgagtttggatctaggtggttggcattaaaatctccctggctttgggttttcttttttgagacagagtcttgctctgtagcccaggctggagtgcagtggtgcgatctcagctcactggaacctccgcctcccaggttcaagcaattctcatgcctcagccttcaagtagatgggattacaggtgcctgccaccatgcccagctaatttttgtattcgtattagagactgggtttccccatgttggccaggctagtctcgaactcctgacattaagtgatccgcctgcctcggcctcccagagtgctgggattgcaggtgtgagccactgcgcccggcccctggctttgggttttctgctcaccttcctccttccctcccacaaatactatgtgtcccaaatgtgccgggatccatgccttgtgctggggacacagaggggaccgatgccatcctggtcatgggggaggatgtggcattttcatgaagagctatgatcgagggggccccacggttgcttcaggagcccagagtaggcatctgaccctgccaggcgtgctcccagacaaggtgacaatggtgctgaggtgcccgagaggaatgagcctcagatactggactgtcagacgtggacatgggggtaagcacagggtccctaccttgcaaggcacgagcccctgacagcctcttctctttccaggtcagccatgtcatctgagcctcccccaccaccacagccccccacccatcaagcttcagtcgggctgctggacacccctcggagccgtgagcgctcaccatcccctctgcgcggcaacgtggtcccaagcccactgcccactcgccggacgaggaccttctcggcgtgagtctggagcaggctggggacgcgttctcagatggatctcttgcctgaggccagagattcactgtgtctctggccatttttgggcctatgtcccggactgccaaataggcagacctggggctgggccgtgggctgagggtgagaaactaggaaggcgccttgtaaattcagggtactgcccagcccagaagaacctgttaccagctgggagtggcaatgggtgggcagttgctggggtcagaatcgctgggctttaaccacacatgagagtctggttccctgtgagactgtgaattctgcagctgcaaaatgggcacagcaccagggctgcaaaggacccacataatgcctggcagatgcaggtctcaggccttgcgagtggaggatgcttgtgttattaatagtaaatcattagtttctggagggatgttcagtgatgttttagttcaactccctctttccaggagggaaaacaggcccgagaaaattggccagggtcacccaaagagtcctttcccccagcgtctttgtgagcggctcccagggttgagggttgtgcagtcctcagcctgtgtgactgtacatggcggtcctggccagggcttgatggggcacagctgtgggcaggggctggaatgagctttgtgtgcccaggagcgctgatggggcccctgacatttccccctctctgtcaggacggtgcgggcttcacagggccccgtctacaaaggagtctgcaaatgcttctgccggtccaagggccatggcttcattaccccagctgatggcggccccgacatcttcctgcacatctctgagtgagtcagcggcaggtctgggtggcctggctggggtgggcgcttccttggccctggcaccaggcaccaagcatgagacctggtctggacatgtcatcagctcctaggagatggtggaagcaccccttgtcctgtgcttgtgggagactttgcggggaggaggcagcagacactggagatgacattcttccacacgagacggggcttcagccgggcatggtccctctcaagtatctcctggaggaaggggtatggggggcaggtgtggggtgtggggtgttcccggccatcagcacagcctatgaccattgcaacaacctctcaccatctgaagagcattaaaagcatttaaaaaggagaggtgcccactggtggctgagtggaggttccaaccccatcccagggagtggatcaagggtggtatttctccagctgctcagacacatgggctcaacccacagaatccctcttcctcctggagctggaggccccagattcccagatctggccccctggcagcctgacagggaccttgcgtgacttctccaaggcaaatttccacctaagtgccccttgcgcctctcctggggcctgggcaaagcagttttctaattcttggcttggttggttctaggggagctggcttgaagtgggtggggaaaggcgggggtggcggtctttggattggacggatgttgccttttggtgcctttgcagtgggaggcggcatagctgcctgtctggggaagacagttctcccagcactcccacccctgggcacagcaggctggtactgggaggctgaacccctcttagagcctgaccttttcatctgccttctggttgtgtgaccatcactcaacagccatttcacagcccctgtaattatggcggcggggggctggggtggtggtggtgggaagggcttgtggagaggacacagtctttgtttaaaaactttgtcccgatccatccagaaaagagtaggtagcttgcatcctgacagcctggcaaagtcaagaaagttgaaggagaaacatacctttggagagggggttttctttaaaactagtgttaagaaatgcttagggattttttttttcttatttttcataactaaagctttcacccagagccggctctgtttgcactttgctgccgacattgcaaactttttggcagggtgggagactgagtctcattctgtcacccaggctggagtgcagtggcccgatctcagcttactgcaacctctgccctccagggttctggcaattccgcctcagtctcctgagtagctgggattacaggcatgcgccaccacacccggttaatttttgtatttttagtagagaccaggtttcatcatgttgggcaggatggtcttgaacccctgacctcaggtgatctgcccatctcggcctctcaaagtgctgggattacaagtgtgagccatcgcgcccggcctgcaaacttttttgtaggtatttctggtaaacaaatccttaggttatctttgctgtggttgtggtttggctttagtcatgatttcaaagtagaaatagctaggcattattttttgaaatatatgacctatatgtagtcaagaatccactgaacagagggaagcaaaccttttggaaactggcttttgggcagacagtaaacgtccagtttgatgctggaagcatgaacagcttcatcaggtaggtactcctcaactctgatgagtttgtcctttcagcctaagggggtggaagggagttgtttgagaatagcaaatacgcatgttgattgcgagtgtgtggagacaaaggcagttcccaccacagttaggtcctggccagtttgtttcctcgcctgcgatgctccttgtacgtcctcaccctcctctcccgcctctgccttctgctgggtcaaaggtggcctttttctctccagccttgaattgttccctgttggcttcccaagggcccatctgctggtacagtccacacttccaaagccaagacccgagagggctttcactgccccaagcctctctcctgtgaccttgggattctgtcttggcagaatcctttgtcagcggctcttgctctgtccttcctgtttggccacagctctttcaatcaatgggtattctagaaccgcaggatgtcagagctggaagggacgcgataccggtttacacaaggggaaactcctcgaggctctgggagggacggagggttttggtgacagagcgagagctaaaattgaggattcctgaatccagatcttgcctcccatcagccatctttctcccaataaatttttgttttgtgc

SEQ ID NO: 54 - DNA, 1147 bp, Homo sapien
gaggatccccatcgaggcsatgtgaagacagccagccgacattcttccaakkggaagatgtgcatagaaacagatacaaacaaatcacatatatggctcaaggtcttgctgtgagagagatgactggtatgactaagtttaaaccctatttcatttctgcaacttctgagattttgtctcaaaaatgcattaatacaaatgtgctttttttgtctctctcagataatcatggacatattgatccctctctgagactcatctgggatttggctttccttggaagctcttacgtgatgtgggaaatgacaacacaggtgtcacactactacttggcacagctcactagtgtgaggcagtggaaaactaatgatgatacaattgattttgattatactgttctacttcatgaattatcaacacaggaaataattccctgtcgcattcacttggtctggtaccctggcaaacctcttaaagtgaagtaccactgtcaagagctacagacaccagaagaagcctccggaactgaagaaggatcagctgtagtaccaacagagcttagtaatttctaaaaagaaaaaatgatctttttccgacttctaaacaagtgactatactagcataaatcattcttctagtaaaacagctaaggtatagacattctaataatttgggaaaacctatgattacaagtaaaaactcagaaatgcaaagatgttggttttttgtttctcagtctgctttagcttttaactctggaagcgcatgcacactgaactctgctcagtgctaaacagtcaccagcaggttcctcagggtttcagccctaaaatgtaaaacctggataatcagtgtatgttgcaccagaatcagcattttttttttaactgcaaaaaatgatggtctcatctctgaatttatatttctcattcttttgaacatactatagctaatatattttatgttgctaaattgcttctatctagcatgttaaacaaagataatatactttcgatgaaagtaaattataggaaaaaaattaactgttttaaaaagaacttgattatgttttatgatttcaggcaagtattcatttttaacttgctacctacttttaaataaatgtttacatttctaaataatgaaa

SEQ ID NO: 55 - DNA, 1415 bp, Homo sapien
caactgcctgcctactgaaaaatatccaatgcactggttttagaaacagcgtgtatagcttcatgtggtatatatgaagaatgtgggtgttggagtcagtagatctgggttggaattcccatttgtcccttcctagctgtaatctcaaattacctctcctgtaaaaccaggctcataatacacagattgtaaaggagaattagatgagaacatgtagaaggtgcctagcacagaacccagcccatggtggaccttctagaattactgattgcccctccccttgtcttattgcctgtcatatcagggctaatatatcagcttgaggtatatatacagtatctagatccttaaggttgttaaaagaatctccctattcccacagacttcggtctccatcagaaaaagtgacagacattcaaccagactttcatataactcagtgacaagacaaaaatgaggatccatgacttccatatcttgaagcaaaataccaccaaaaaccgtgaggctgaaatcgaaaaggcagtaggagacacaaggcacccattcaaaacaagaatgtattgtatagttattacactaaataccaccatatttattacactaactcttttttctccctctagaaaaactaatgatgatacaattgattttgattatactgttctacttcatgaattatcaacacaggaaataattccctgtcgcattcacttggtctggtaccctggcaaacctcttaaagtgaagtaccactgtcaagagctacagacaccagaagaagcctccggaactgaagaaggatcagctgtagtaccaacagagcttagtaatttctaaaaagaaaaaatgatctttttccgacttctaaacaagtgactatactagcataaatcattcttctagtaaaacagctaaggtatagacattctaataatttgggaaaacctatgattacaagtaaaaactcagaaatgcaaagatgttggttttttgtttctcagtctgctttagcttttaactctggaagcgcatgcacactgaactctgctcagtgctaaacagtcaccagcaggttcctcagggtttcagccctaaaatgtaaaacctggataatcagtgtatgttgcaccagaatcagcattttttttttaactgcaaaaaatgatggtctcatctctgaatttatatttctcattcttttgaacatactatagctaatatattttatgttgctaaattgcttctatctagcatgttaaacaaagataatatactttcgatgaaagtaaattataggaaaaaaattaactgttttaaaaagaacttgattatgttttatgatttcaggcaagtattcatttttaacttgctacctacttttaaataaatgtttacatttctaaataatgaaa

SEQ ID NO: 56 - DNA, 2201 bp, Homo sapien
caggatcagatacgcacttctgcttcttctacaggagagaagagaatagttttgatagagaccagggaagaagccacctgtgccaaagcatggatggggaccagacagaagagagaatgatgaagatgatggtgcatcagagacctttgccccagccagcactacttcctatgagctccaacactttcccttcaagatctactaagccaagtcccatgaaccctctcccatcctctcacatgcctggagcattctcagaaagtaacagcagttttccacagagtgcctccctgccaccatacttctctcaaggccctagcaacagaccacctatcagagccgaaggcagaaacttccccttgccacttccaaacaaacctcggcccccatcccccgcggaggaagagaattcattaaatgaagagtggtacgtttcttatattacccgaccagaggcagaagctgctcttagaaagataaaccaggatggcacatttctggtcagagacagctctaaaaaaacaacaaccaatccatatgtcctcatggtgttgtacaaagataaagtttacaacatccagatccgttatcagaaggaaagtcaagtttacttgttgggaactggactccgagggaaagaggactttctgtctgtgtcagatattattgactacttcaggaaaatgccacttctgctcattgatgggaaaaaccgaggttccagataccagtgcacattaacgcatgctgcagggtacccatagcaagttatagccgagcaaatgaaccgtcctcctgcctctgttgccaacacgagatcaatcagccttggtcaatggacaaacacttaggactgaactgaacccctccccatgaacacaagggttttatcctttcctttaaaaacagtgtttgaaatgaagactgtcaactatcccataatttatttattcttcttcaatgtttgtaaagtgcatgagtcatgttcacacttgaagtctagtagtgcactgtaataattcattttttaaaagattatttaatgcccatttcaaaatacagtagtttacacagctacagaaacaatttggggcaagttttaaaacactgaaacagtaatagttattggtgtcacataaaactgatttgttttttacagccaaacctctgtcagtcagaggcattcattagttttatacatgtaatttgaaaatcactaaacctcgttttctcagcagcaataatttaagaggcttcaaaaatataatttcactcttatttagtattttttcctgggggcatttttacgtaatttttttatgaaaagacaaatgcatgttgagataacttctgggattaaaatagtcttttgctttacttttttggtttcctaaaacaactttattgacttttagtccatactgttatatttttgtcttaaagaaaatttaaactacaaataccaaaagaaaacattttaaatttagggatgagactttggtgtatcgtgggtctaggtttaatgaacacatctggggttaagttggcatttcttcacatctccacacccacaccaaccatcacagccccccaccaaccttctcccaaccccaaaagcattgtccagggatatagattttaccaaaggcttcctgggaagacgagggagcaacactttagattaaatgtgatcagactttcctattagatatggctcttctgtctcttgttatccccctgacagctctgccataaagtcccttctcctcatccttcccaaacaggctgtataagtgctttgaggtaattaaactctttcctccagtttacaaatatcacttaacaaaaaatataggcattcagccagattaaaaaactggtattcagccaaatagtgacaatcagttgttcttcaagtttttccctttgggaccttggttgttattgcacaacttttattagcaacaatttttggcgtctctgcttaatctacaagttttcgaaatggaaaagagtatcttgcagcttcattttcatgagctaataaaaggggtattggaaggaatctaagaagtcaccattttaaaactgatgatatgttaaaataaggagtatgcagaaggtagagacttttaactgatgataaaaatggtgtttcacaaaatctcatccttaacaaccagaagttctcagtttagggt

SEQ ID NO: 57 - DNA, 2435 bp, Homo sapien
ccccttccagtccctgctccttcaatagacagaagcacgaaacctcccctagatcgttcattagctccgtttgatagagaacccttcacactaggggaggttgcgtgcttctgtctattgaaggagcacgaaacctcccctagatcgttcattagctccgtttgatagagaacccttcacactaggaaagaaaccaccattttctgacaagccctcgattccagcgggaaggtcactcggggagcatttacccaagattcaaaagcctcctttaccaccgaccacggaaagacatgaaaggagcagccccctgccagggaagaagccacctgtgccaaagcatggatggggaccagacagaagagagaatgatgaagatgatgtgcatcagagacctttgccccagccagcactacttcctatgagctccaacactttcccttcaagatctactaagccaagtcccatgaaccctctcccatcctctcacatgcctggagcattctcagaaagtaacagcagttttccacagagtgcctccctgccaccatacttctctcaaggccctagcaacagaccacctatcagagccgaaggcagaaacttccccttgccacttccaaacaaacctcggcccccatcccccgcggaggaagagaattcattaaatgaagagtggtacgtttcttatattacccgaccagaggcagaagctgctcttagaaagataaaccaggatggaaacatttctcacatttatgtcttctaacacacgtgggtaaagaatcagtaactgccaatgaatgagatagcataaaattttgactttcataaaacaaaacttgtaaatcatttctgaaatttataaggtttccagctgacaattttctgccaagttaacatttcaaaaatgaaaaacaaaatcaatgtgtattttagagtatcatctagatctgcgcccctttgtaaatggattctatggtggttaagtcatctagaaacaccctgggagcaaggttccatcctactacttcctaattacatctgatctgctttatttttgtgtcctctttatactagctgtttctaactggggggcggttatggaatgtttcttagtgacagctggggcctgccaatctcattcattgttttctacttctgcacgtgcatcagagacctttgccccagccagcactacttcctatgagctccaacactttcccttcaagatctactaagccaagtcccatgaaccctctcccatcctctcacatgcctggagcattctcagaaagtaacagcagttttccacagagtgcctccctgccaccatacttctctcaaggccctagcaacagaccacctatcagagccgaaggcagaaacttccccttgccacttccaaacaaacctcggcccccatcccccgcggaggaagagaattcattaaatgaagagtggtacgtttcttatattacccgaccagaggcagaagctgctcttagaaagataaaccaggatggcacatttctggtcagagacagctctaaaaaaacaacaaccaatccatatgtcctcatggtgttgtacaaagataaagtttacaacatccagatccgttatcagaaggaaagtcaagtttacttgttgggaactggactccgagggaaagaggactttctgtctgtgtcagatattattgactacttcaggaaaatgccacttctgctcattgatgggaaaaaccgaggttccagataccagtgcacattaacgcatgctgcagggtacccatagcaagttatagccgagcaaatgaaccgtcctcctgcctctgttgccaacacgagatcaatcagccttggtcaatggacaaacacttaggactgaactgaacccctccccatgaacacaagggttttatcctttcctttaaaaacagtgtttgaaatgaagactgtcaactatcccataatttatttattcttcttcaatgtttgtaaagtgcatgagtcatgttcacacttgaagtctagtagtgcactgtaataattcattttttaaaagattatttaatgcccatttcaaaatacagtagtttacacagctacagaaacaatttggggcaagttttaaaacactgaaacagtaatagttattggtgtcacataaaactgatttgttttttacagccaaacctctgtcagtcagaggcattcattagttttatacatgtaatttgaaaatcactaaacctcgttttctcagcagcaataatttaagaggcttcaaaaatataatttcactcttatttagtattttttcctgggggcatttttacgtaatttttttatgaaaagacaaatgcatgttgagataacttctgggattaaaatagtcttttgctttaaaaaacctcgccgcgaccacgc

SEQ ID NO: 58 - DNA, 3612 bp, Homo sapien
cgaactccgccccctcttctccgcgtaggcccagctccctgaagcggctgtttcgagccacgcgcccatcgggtaccgaggcacgcgccgggcgtcacgtgcgtttcgcggcgagcggaaatgacgcgagttgtgtgagccgccagtatggccgggctatggcggcgagcactggctacgtgcgactgtggggagcggcgcggtgctgggtgctgcggcggccgatgctggccgccgccggggggcgggttcccactgcagcaggagcgtggttgctccgaggccagcggacctgcgacgcctctcctccttgggcactgtggggccgaggcccggcaattgggggccaatggcgggggttttgggaagcgagcagccgcggcggaggcgcattctcggggggcgaggacgcctccgagggcggcgcggaggaaggagccggcggcgcggggggcagcgcgggcgccggggaaggcccggtcataacggcgctcacgcccatgacgatccccgatgtgtttccgcacctgccgctcatcgccatcacccgcaacccggtgttcccgcgctttatcaagattatcgaggttaaaaataagaagttggttgagctgctgagaaggaaagttcgtctcgcccagccttatgtcggcgtctttctaaagagagatgacagcaatgagtcggatgtggtcgagagcctggatgaaatctaccacacggggacgtttgcccagatccatgagatgcaggaccttggggacaagctgcgcatgatcgtcatgggacacagaagagtccatatcagcagacagctggaggtggagcccgaggagccggaggcggagaacaagcacaagccccgcaggaagtcaaagcggggcaagaaggaggcggaggacgagctgagcgccaggcacccggcggagctggcgatggagcccacccctgagctcccggctgaggtgctcatggtggaggtagagaacgttgtccacgaggacttccaggtcacggaggaggtgaaagccctgactgcagagatcgtgaagaccatccgggacatcattgccttgaaccctctctacagggagtcagtgctgcagatgatgcaggctggccagcgggtggtggacaaccccatctacctgagcgacatgggcgccgcgctcaccggggccgagtcccatgagctgcaggacgtcctggaagagaccaatattcctaagcggctgtacaaggccctctccctgctgaagaaggaatttgaactgagcaagctgcagcagcgcctggggcgggaggtggaggagaagatcaagcagacccaccgtaagtacctgctgcaggagcagctaaagatcatcaagaaggagctgggcctggagaaggacgacaaggatgccatcgaggagaagttccgggagcgcctgaaggagctcgtggtccccaagcacgtcatggatgttgtggacgaggagctgagcaagctgggcctgctggacaaccactcctcggagttcaatgtcacccgcaactacctagactggctcacgtccatcccttggggcaagtacagcaacgagaacctggacctggcgcgggcacaggcagtgctggaggaagaccactacggcatggaggacgtcaagaaacgcatcctggagttcattgccgttagccagctccgcggctccacccagggcaagatcctctgcttctatggcccccctggcgtgggtaagaccagcattgctcgctccatcgcccgcgccctgaaccgagagtacttccgcttcagcgtcgggggcatgactgacgtggctgagatcaagggccacaggcggacctacgtgggcgccatgcccgggaagatcatccagtgtttgaagaagaccaagacggagaaccccctgatcctcatcgacgaggtgcgtgcggagaggcccggagaccccctaacccggcaatgccgtgtgcaagatgaagccgagccttccgggtcctaggatccccgagccaactcaggggccatcgccgtgatgctggccctgatggcacggacgggtccctcccacccacagccacgcccagcaggctgcccgtccaaggcagggtgtgggtgccgctctcactcggggtctccccagccctgaccctggggtctccccactgggcgggctggccaggggcacggcgaggggcaccacctgctgtctgctgccccaggtggacaagatcggccgaggctaccagggggacccgtcgtcggcactgctggagctgctggacccagagcagaatgccaacttcctggaccactacctggacgtgcccgtggacttgtccaaggtggggggcctgtctggggcctgggcttgctggggagggtaagcggccagtcccccagcaccttgccgccgcccccaggtgctgttcatctgcacggccaacgtcacggacaccatccccgagccgctgcgagaccgtatggagatgatcaacgtgtcgggctacgtggcccaggagaagctggccattgcggagcgctacctggtgccccaggctcgcgccctgtgtggcttggatgagagcaaggccaagctgtcatcggacgtgctgacgctgctcatcaagcagtactgccgcgagagcggtgtccgcaacctgcagaagcaagtggagaaggtgttacggaaatcggcctacaagattgtcagcggcgaggccgagtccgtggaggtgacgcccgagaacctgcaggacttcgtggggaagcccgtgttcaccgtggagcgcatgtatgacgtgacaccgcccggcgtggtcatggggctggcctggaccgcaatgggaggctccacgctgtttgtggagacatccctgagacggccacaggacaaggatgccaagggtgacaaggatggcagcctggaggtgacaggccagctgggggaggtgatgaaggagagcgcccgcatagcctacaccttcgccagagccttcctcatgcagcacgcccccgccaatgactacctggtgacctcacacatccacctgcatgtgcccgagggcgccacccccaaggacggcccaagcgcaggctgcaccatcgtcacggccctgctgtccctggccatgggcaggcctgtccggcagaatctggccatgactggcgaagtctccctcacgggcaagatcctgcctgttggtggcatcaaggagaagaccattgcggccaagcgcgcaggggtgacgtgcatcgtcctgccagccgagaacaagaaggacttctacgacctggcagccttcatcaccgagggcctggaggtgcacttcgtggaacactaccgggagatcttcgacatcgccttcccggacgagcaggcagaggcgctggccgtggaacggtgacggccaccccgggactgcaggcggcggatgtcaggccctgtctgggccagaactgagcgctgtggggagcgcgcccggacctggcagtggagccaccgagcgagcagctcggtccagtgacccagatcccagggacctcagtcggcttaatcagagtgtggcatagaagctatttaatgattaaagtcatttgcagta

SEQ ID NO: 59 - DNA, 2744 bp, Homo sapien
tcctgggttcacgccattctcctgcctcagcctcccgagtagctgggactacaggcgcccgccatcacgcccgcctaatttttgtattttttggtagagacggggtttcactgtgttagccaggagggtctcgatctcctgacctcatgatccacccgcctcggcctcccaaagtgcttggattacaggcgtgagccaccacgcccggccaagacttggtctcttaaaaaatggaggaaagaaaacacagtctctttttttcccctgagatagcttatcctaaggacaaggctctgaggggtaaggagacagggtttggttttagttttgactctcttggtcctgtgtccctgggactggtgagtccaccagggactgcactcctccatctcccaggccgtccgtggccagggccagttggcggaggggagggagttgatggagctggtgggtggggctcccagggccatgctcccacccagcccaccccctgctggagcactgctgggccccagcgaccctgccccatacttggcgccctgactgcagagatcgtgaagaccatccgggacatcattgccttgaaccctctctacagggagtcagtgctgcagatgatgcaggctggccagcgggtggtggacaaccccatctacctgagcgacatgggcgccgcgctcaccggggccgagtcccatgagctgcaggacgtcctggaagagaccaatattcctaagcggctgtacaaggccctctccctgctgaagaaggaatttgaactgagcaagctgcagcagcgcctggggcgggaggtggaggagaagatcaagcagacccaccgtaagtacctgctgcaggagcagctaaagatcatcaagaaggagctgggcctggagaaggacgacaaggatgccatcgaggagaagttccgggagcgcctgaaggagctcgtggtccccaagcacgtcatggatgttgtggacgaggagctgagcaagctgggcctgctggacaaccactcctcggagttcaatgtcacccgcaactacctagactggctcacgtccatcccttggggcaagtacagcaacgagaacctggacctggcgcgggcacaggcagtgctggaggaagaccactacggcatggaggacgtcaagaaacgcatcctggagttcattgccgttagccagctccgcggctccacccagggcaagatcctctgcttctatggcccccctggcgtgggtaagaccagcattgctcgctccatcgcccgcgccctgaaccgagagtacttccgcttcagcgtcgggggcatgactgacgtggctgagatcaagggccacaggcggacctacgtgggcgccatgcccgggaagatcatccagtgtttgaagaagaccaagacggagaaccccctgatcctcatcgacgaggtggacaagatcggccgaggctaccagggggacccgtcgtcggcactgctggagctgctggacccagagcagaatgccaacttcctggaccactacctggacgtgcccgtggacttgtccaaggtgctgttcatctgcacggccaacgtcacggacaccatccccgagccgctgcgagaccgtatggagatgatcaacgtgtcgggctacgtggcccaggagaagctggccattgcggagcgctacctggtgccccaggctcgcgccctgtgtggcttggatgagagcaaggccaagctgtcatcggacgtgctgacgctgctcatcaagcagtactgccgcgagagcggtgtccgcaacctgcagaagcaagtggagaaggtgttacggaaatcggcctacaagattgtcagcggcgaggccgagtccgtggaggtgacgcccgagaacctgcaggacttcgtggggaagcccgtgttcaccgtggagcgcatgtatgacgtgacaccgcccggcgtggtcatggggctggcctggaccgcaatgggaggctccacgctgtttgtggagacatccctgagacggccacaggacaaggatgccaagggtgacaaggatggcagcctggaggtgacaggccagctgggggaggtgatgaaggagagcgcccgcatagcctacaccttcgccagagccttcctcatgcagcacgcccccgccaatgactacctggtgacctcacacatccacctgcatgtgcccgagggcgccacccccaaggacggcccaagcgcaggctgcaccatcgtcacggccctgctgtccctggccatgggcaggcctgtccggcagaatctggccatgactggcgaagtctccctcacgggcaagatcctgcctgttggtggcatcaaggagaagaccattgcggccaagcgcgcaggggtgacgtgcatcgtcctgccagccgagaacaagaaggacttctacgacctggcagccttcatcaccgagggcctggaggtgcacttcgtggaacactaccgggagatcttcgacatcgccttcccggacgagcaggcagaggcgctggccgtggaacggtgacggccaccccgggactgcaggcggcggatgtcaggccctgtctgggccagaactgagcgctgtggggagcgcgcccggacctggcagtggagccaccgagcgagcagctcggtccagtgacccagatcccagggacctcagtcggcttaatcagagtgtggcatagaagctatttaatgattaaagtcatttgcagta

SEQ ID NO: 60 - DNA, 2742 bp, Homo sapien
cgaactccgccccctcttctccgcgtaggcccagctccctgaagcggctgtttcgagccacgcgcccatcgggtaccgaggcacgcgccgggcgtcacgtgcgtttcgcggcgagcggaaatgacgcgagttgtgtgagccgccagtatggccgggctatggcggcgagcactggctacgtgcgactgtggggagcggcgcggtgctgggtgctgcggcggccgatgctggccgccgccggggggcgggttcccactgcagcaggagcgtggttgctccgaggccagcggacctgcgacgcctctcctccttgggcactgtggggccgaggcccggcaattgggggccaatggcgggggttttgggaagcgagcagccgcggcggaggcgcattctcggggggcgaggacgcctccgagggcggcgcggaggaaggagccggcggcgcggggggcagcgcgggcgccggggaaggcccggtcataacggcgctcacgcccatgacgatccccgatgtgtttccgcacctgccgctcatcgccatcacccgcaacccggtgttcccgcgctttatcaagattatcgaggttaaaaataagaagttggttgagctgctgagaaggaaagttcgtctcgcccagccttatgtcggcgtctttctaaagagagatgacagcaatgagtcggatgtggtcgagagcctggatgaaatctaccacacggggacgtttgcccagatccatgagatgcaggaccttggggacaagctgcgcatgatcgtcatgggacacagaagagtccatatcagcagacagctggaggtggagcccgaggagccggaggcggagaacaagcacaagccccgcaggaagtcaaagcggggcaagaaggaggcggaggacgagctgagcgccaggcacccggcggagctggcgatggagcccacccctgagctcccggctgaggtgctcatggtggaggtagagaacgttgtccacgaggacttccaggtcacggaggaggtgaaagccctgactgcagagatcgtgaagaccatccgggacatcattgccttgaaccctctctacagggagtcagtgctgcagatgatgcaggctggccagcgggtggtggacaaccccatctacctgagcgacatgggcgccgcgctcaccggggccgagtcccatgagctgcaggacgtcctggaagagaccaatattcctaagcggctgtacaaggccctctccctgctgaagaaggaatttgaactgagcaagctgcagcagcgcctggggcgggaggtggaggagaagatcaagcagacccaccgtaagtacctgctgcaggagcagctaaagatcatcaagaaggagctgggcctggagaaggacgacaaggatgccatcgaggagaagttccgggagcgcctgaaggagctcgtggtccccaagcacgtcatggatgttgtggacgaggagctgagcaagctgggcctgctggacaaccactcctcggagttcaatgtcacccgcaactacctagactggctcacgtccatcccttggggcaagtacagcaacgagaacctggacctggcgcgggcacaggcagtgctggaggaagaccactacggcatggaggacgtcaagaaacgcatcctggagttcattgccgttagccagctccgcggctccacccagggcaagatcctctgcttctatggcccccctggcgtgggtaagaccagcattgctcgctccatcgcccgcgccctgaaccgagagtacttccgcttcagcgtcgggggcatgactgacgtggctgagatcaagggccacaggcggacctacgtgggcgccatgcccgggaagatcatccagtgtttgaagaagaccaagacggagaaccccctgatcctcatcgacgaggtggacaagatcggccgaggctaccagggggacccgtcgtcggcactgctggagctgctggacccagagcagaatgccaacttcctggaccactacctggacgtgcccgtggacttgtccaaggtgctgttcatctgcacggccaacgtcacggacaccatccccgagccgctgcgagaccgtatggagatgatcaacgtgtcgggctacgtggcccaggagaagctggccattgcggagcgctacctggtgccccaggctcgcgccctgtgtggcttggatgagagcaaggccaagctgtcatcggacgtgctgacgctgctcatcaagcagtactgccgcgagagcggtgtccgcaacctgcagaagcaagtggagaaggtgttacggaaatcggcctacaagattgtcagcggcgaggccgagtccgtggaggtgacgcccgagaacctgcaggacttcgtggggaagcccgtgttcaccgtggagcgcatgtatgacgtgacaccgcccggcgtggtcatggggctggcctggaccgcaatgggtgagcgtggtggcgggagaagaccccaaagccattcccatttctacccgagaacaagcaggtcccaccttgtacacctgtgcagtgggcctcaggtggctctgaacggcctctggcggggggtggtgtgctgggagcccagggggtctgggctgagggaggggaaggctgtgacacatgggggtggcagcacaccatgggccttatggatttgggtgccactttgataggcttacaggtaaggacaagctcatccagatgggc

SEQ ID NO: 61 - DNA, 2116 bp, Homo sapien
tgttgtactggctggagtacagtggtgcagtctcagctcactgcaacctccgcctctcgggttcaagcgattctcctgcctcagcctcccgagaagctggaattacaggcatgcgccaccacgcccagctaattttgtatttttagtaaagatggtgtttctccatgttggtcaggctggtctcgaactcccgacctcaggtgatccgcccacctcggcctcccaaagtgctggcatgacagagctagagctcgggcccagccccaggctgcagcccattcgcaggcacccgaaagaacttccccagtatggtggtcctggaaaggacatttttgaagatcaactatatcttcctgtgcattccgatggaatttcagttcatcagatgttcaccatggccaccgcagaacaccgaagtaattccagcatagcggggaagatgttgaccaaggtggagaagaatcacgaaaaggagaagtcacagcacctagaaggcagcgcctcctcttcactctcctctgattagatgaaactgttaccttaccctaaacacagtatttctttttaacttttttatttgtaaactaataaaggtaatcacagccaccaacattccaagctaccctgggtacctttgtgcagtagaagctagtgagcatgtgagcaagcggtgtgcacacggagactcatcgttataatttactatctgccaagagtagaaagaaaggctggggatatttgggttggcttggttttgattttttgcttgtttgtttgttttgtactaaaacagtattatcttttgaatatcgtagggacataagtatatacatgttatccaatcaagatggctagaatggtgcctttctgagtgtctaaaacttgacacccctggtaaatctttcaacacacttccactgcctgcgtaatgaagttttgattcatttttaaccactggaatttttcaatgccgtcattttcagttagatgattttgcactttgagattaaaatgccatgtctatttgattagtcttatttttttatttttacaggcttatcagtctcactgttggctgtcattgtgacaaagtcaaataaacccccaaggacgacacacagtatggatcacatattgtttgacattaagcttttgccagaaaatgttgcatgtgttttacctcgacttgctaaaatcgattagcagaaaggcatggctaataatgttggtggtgaaaataaataaataagtaaacaaaatgaagattgcctgctctctctgtgcctagcctcaaagcgttcatcatacatcatacctttaagattgctatattttgggttattttcttgacaggagaaaaagatctaaagatcttttattttcatcttttttggttttcttggcatgactaagaagcttaaatgttgataaaatatgactagttttgaatttacaccaagaacttctcaataaaagaaaatcatgaatgctccacaatttcaacataccacaagagaagttaatttcttaacattgtgttctatgattatttgtaagaccttcaccaagttctgatatcttttaaagacatagttcaaaattgcttttgaaaatctgtattcttgaaaatatccttgttgtgtattaggtttttaaataccagctaaaggattacctcactgagtcatcagtaccctcctattcagctccccaagatgatgtgtttttgcttaccctaagagaggttttcttcttatttttagataattcaagtgcttagataaattatgttttctttaagtgtttatggtaaactcttttaaagaaaatttaatatgttatagctgaatctttttggtaactttaaatctttatcatagactctgtacatatgttcaaattagctgcttgcctgatgtgtgtatcatcggtgggatgacagaacaaacatatttatgatcatgaataatgtgctttgtaaaaagatttcaagttattaggaagcatactctgttttttaatcatgtataatattccatgatacttttatagaacaattctggcttcaggaaagtctagaagcaatatttcttcaaataaaaggtgtttaaacttt

SEQ ID NO: 62 - DNA, 1855 bp, Homo sapien
gggggcggggaagtggcggctgaagcgccgccggcggggctcactgtggtggtgtgagtgggaggcggcggcgctggtggctgcagctggggtgaggcgcgaggcggcgcactcgacggctgactggagcagcggtaaaggcgaggatggagaccgaaggatataagtcaaagagtacagcagaaaatgtctactgaacggacttcttggacaagcctgtccaccattcagaaaatagccctgggccttgggatcccagccagtgcaacagttgcctatatcctataccgcaggtatagggaaagcagagaagagcggctgacatttgttggggaagatgacattgagatagagatgcgggttccccaggaggctgtgaaactcatcattggccggcaaggagccaatattaaacagctgcggaaacagacaggtgctcggattgatgtggacacagaggatgtaggcgatgagcgagtgctgcttatcagtggttttcctgttcaggtgtgcaaggccaaagcagcaatccatcagatcctgacagagaataccccagtgtctgagcagctttcagttccccagagatctgtgggcagaatcatagggagaggcggcgagacaattcgttctatctgtaaggcatctggagccaaaattacctgtgacaaagaatcagaagggacattactactatcaagacttataaaaatctcaggaacacagaaggaagtggcagcagccaagcatttgatactggagaaagtttcagaagatgaagaacttcggaagagaattgctcattctgcagaaaccagggtcccacgcaaacagccaatcagtgtgagaagagaagacatgacagagccaggtggagctggagagccagcattatggaaaaacaccagttctagcatggagccgactgcacccctggtgactcctccacccaaaggaggaggcgacatggctgtggtagtgtcaaaggaaggttcctgggagaaacctagtgatgacagctttcagaagtctgaagcccaggccatcccagagatgcccatgtttgaaagtatgtaacaaagagggagcccattaatcattgaagatagaaatactggcttagatattggagagattagaaggaatgccttctcagtctgagcagccagtataatatggctggggtcaggacagaagattcggtaagatattttgaagatgggatggaggtagaatccacaccaacagttgctggacagtttgaggatgcagatgttgatcactgaaaatgatttatgcaggtataagattctgctcctaattgtaggagagaacttggtgcctcttccactctgaagcaaagttgatgaaagtcttcttccttttcccaaaacccaacctgaactacttctttcttggagacagactatattgagacaagttgttaccagcaaaagatagatacatgacctttattaacaaaaatgaattaaccaagaggatatttgtagtttattatttaccccaaactttctgtgtctgggtaccctctgagtaggcctataattcctgccttcactgtatgcattttatgtaagctagcagacctatgtggtgagaatgcacaggagcttggaggtataaatagacagggtgggaaagagagagctcctttcgccatgttttaccagcccgctctgttataacctcttaggttatattctttaatttccaaccttttaggttagtttctgtaacagaacaaatgagtctgggataaagtcctcaaagtacttcaaatggtaattgttttgtttttgtaacggcttaacaaataacctaggttttctgttta

SEQ ID NO: 63 - DNA, 1136 bp, Homo sapien
sgctaggtacaggccggkgtkaatcggccgaggcgcacgtgctggaaggcccagacaccaacaccacgatcattcagctgcagcccttgcaggagcccgagagctgggcgcgcacgcagagtggcctgcagtcctacctgctccagttccacggcctcgtgcgcctggtgcaccaggagcggaccttggcctttcctctgaccatccgctgcttcctgggctgtgagctgcctcccgagggctctagagcccatgtcttcttcgaagtggctgtgaatgggagctcctttgtgagtttccggccggagagagccttgtggcaggcagacacccaggtcacctccggagtggtcaccttcaccctgcagcagctcaatgcctacaaccgcactcggtatgaactgcgggaattcctggaggacacctgtgtgcagtatgtgcagaaacatatttccgcggaaaacacgaaagggagccaaacaagccgctcctacacttcgctggtcctgggcgtcctggtgggcagtttcatcattgctggtgtggctgtaggcatcttcctgtgcacaggtggacggcgatgttaattactctccagccccgtcagaaggggctggattgatggaggctggcaagggaaagtttcagctcactgtgaagccagactccccaactgaaacaccagaaggtttggagtgacagctcctttcttctcccacatctgcccactgaagatttgagggaggggagatggagaggagaggtggacaaagtacttggtttgctaagaacctaagaacgtgtatgctttgctgaattagtctgataagtgaatgtttatctatctttgtggaaaacagataatggagttggggcaggaagcctatggcccatcctccaaagacagacagaatcacctgaggcgttcaaaagatataaccaaataaacaagtcatccacaatcaaaatacaacattcaatacttccaggtgtgtcagacttgggatgggacgctgatataatagggtagaaagaagtaacacgaagaagtggtggaaatgtaaaatccaagtcatatggcagtgatcaattattaatcaattaataatattaataaatttcttatatttaaggca

SEQ ID NO: 64 - DNA, 2320 bp, Homo sapien
cgggatagctgtcttgagccccaagcctcttcctcccctgctgcccctctgcagccattcgggatgggaccccctctggggtgtcagcacgaaagggctaacgggagccccttccttggcctccccctgtaggttacagagccatcacggtgcggaagctcatgcagggcatgggccttggcctctccagcgtctttgctctgtgcctgggccacacctccagcttctgtgagtctgtggtctttgcatcagcctccatcggcctccagaccttcaaccacagtggcatttctgttaacatccaggacttggccccgtcctgcgccggctttctgtttggtgtggccaacacagccggggccttggcaggtgtcgtgggtgtgtgtctaggcggctacttgatggagaccacgggctcctggacttgcctgttcaaccttgtggccatcatcagcaacctggggctgtgcaccttcctggtgtttggacaggctcagagggtggacctgagctctacccatgaggacctctagctcccaaccccacagcctctccaaggacccaggcgccagcagccccgggacacaggggactcagtgtgtgggacttggtcactccatgtcagacacacgagcagagaggaacacaaaccactgtggagcctgaagctccttaagaagagtccacaacagctggtgggagggtggggtgggcctgggtccagaccaggctcgctgctctctgggcctcagtttccccacctgccagcgggctcggccctgtcctcctcacaggctggtgtggccgtcagggtgggtggggttattgttagtaggcgcagcctcattcccaccacgatctgttccgcgtggttcccgccaaacctccctcggtcgccgtgttctccgcaagcctcctgcagcgcccgcctgccaatgtgaggctggcaccaggctgcagcctccccaatcccagcccactttgctgtgtctctggcgggctgtcctccttggtgggagctgtcctgcacactgtaggatgcttaaaggtatccctggcctccacccatccctagccagcagctcccagtcagacaacagccagaaatgtctccagactctgcccagcctccccaggtagccaccctcgagacatgacctcagagtctctgtgtctcctagaagcctgacagagacccccagggcagtgggtgggtggcgggctagagacccttgcctgtgtccgggaccctggcgccgctctcccctcctgtggatccctccgcactaacagtgttctcagtgggcagacgcctgggcaccccttgggccctgcccagcatggccatggcgcaggctctcgaacccgcatggctttcccaggcctggtgattctgctctccagggacggttggcaccttcctcgggggcgggccccacgcaccccagaacacacagacccacctttctggcgttctttctacctcccttttcgttgcctgaggagctggtggtttcatgagttaatgatacatcttgcaaggtgtacacatagagaaaaaaacctaaaaatgtggaaaagcacgccaaagccttatttaaataataactattaaactattcaaaaagaaaaaaaaaaaacaaacaaaaaacataaaaacaaaaaaacaaaaagaaaaaaaaaaaaaacaaaacaggggggcgggcgcgccccagaagaaatcccgcccgcggggggcggccccaataaccgcgcgaccacccggcttccttgttagcacacaacaggggggggcgccccacaagaacgagcgagcgcaccgtagtcataactatacgcagcgcgagctccgatggccgcgcccacacacctcaaccacacagtcgtgggtacaccctgcggcaaccaaacgctggccacaacccggcggaaacatcttgcgtggagagaaaggcgacccgctcacactaccccagcgagagcgagggacggcaacccaaacatcggtgtgggggccgccgacaaacctccctcactcctcaaccatgcgcgacgatcttcattaccaaatcgcccccctcgctcgacgggcggcgacgaatcgctcatcacacacaatccatcttattcacacggccgtcgcgctatcctccacgcgtgtgtggtgcctcatcacaccgaacgacgggtcgcatcaataatatgtcgacccggcccgcgctagctcgtcaggaaaatgaagatttcgtgctggctcaatcttaggaggcagaaattgcactcgatcgttcgtcgctgacgaacacacatttctttctcc

SEQ ID NO: 65 - DNA, 1609 bp, Homo sapien
agcggggagaaacgttgcagcccgcgccgaacgccgggcagcacaaaggatccccgactgccggggagcggtgctcggagggcacaggtctacgccatcccccacgcagtttcggagatggagcgctgggcccatggagggaaggcggcaggctcggcggctccggcagcttgctggggcaggggctcaaggcggcagtccgatagtggaggccgctgagaactgtcacggagctgcgtctgtacagcgagcatcccttatttattcagggcgagtgtgtatttggggcggcgtgcagggggctgacaaagaccggagagctcccggtgcggccgccggcggagcgaagactggaacccgtatgagcgccccccagcgcccctgagcgctcgccgccggtgcacggcgcaccccgcgggaggcagggatcagcaaagccgtgcgccccgaggcccgcccccgtctccgcacaaagaccgagctggaggatcttcagaagaagcctcccccatacctgcggaacctgtccagcgatgatgccaatgtcctggtgtggcacgctctcctcctacccgaccaacctccctaccacctgaaagccttcaacctgcgcatcagcttcccgccggagtatccgttcaagcctcccatgatcaaattcacaaccaagatctaccaccccaacgtggacgagaacggacagatttgcctgcccatcatcagcagtgagaactggaagccttgcaccaagacttgccaagtcctggaggccctcaatgtgctggtgaatagaccgaatatcagggagcccctgcggatggacctcgctgacctgctgacacagaatccggagctgttcagaaagaatgccgaagagttcaccctccgattcggagtggaccggccctcctaactcatgttctgaccctctgtgcactggatcctcggcatagcggacggacacacctcatggactgaggccagagccccctgtggcccattccccattcatttttcccttcttaggttgttagtcattagtttgtgtgtgtgtgtggtggagggaagggagctatgagtgtgtgtgttgtgtatggactcactcccaggttcacctggccacaggtgcacccttcccacaccctttacattccccagagccaagggagtttaagtttgcagttacaggccagttctccagctctccatcttagagagacaggtcaccttgcaggcctgcttgcaggaaatgaatccagcagccaactcgaatccccctagggctcaggcactgagggcctggggacagtggagcatatgggtgggagacagatggagggtaccctatttacaactgagtcagccaagccactgatgggaatatacagatttaggtgctaaaccgtttattttccacggatgagtcacaatctgaagaatcaaacttccatcctgaaaatctatatgtttcaaaaccacttgccatcctgttagattgccagttcctgggaccaggcctcagactgtgaagtatatatcctccagcattcagtccagggggagccacggaaaccatgttcttgcttaagccattaaagtcagagatgaa

SEQ ID NO: 66 - DNA, 1414 bp, Homo sapien
tcctgcctgaaacttgtgataacaactgggtgcatctccagtgcaggaaaagtccttggcatcttggtgccaggcattctgctactgctggtggtgggttatgaacacagatgaccaggatgaagtccttgccttggaataagcccatagcccatcccataatttgatgcctgtattactagagtcctgagaaacacggaatgctgattagaatttgggacaaagttccctgagtattctctggaggaaaagatgcggaggtggacctggaaggcctcctggagagctggaggatcttcagaagaagcctcccccatacctgcggaacctgtccagcgatgatgccaatgtcctggtgtggcacgctctcctcctacccgaccaacctccctaccacctgaaagccttcaacctgcgcatcagcttcccgccggagtatccgttcaagcctcccatgatcaaattcacaaccaagatctaccaccccaacgtggacgagaacggacagatttgcctgcccatcatcagcagtgagaactggaagccttgcaccaagacttgccaagtcctggaggccctcaatgtgctggtgaatagaccgaatatcagggagcccctgcggatggacctcgctgacctgctgacacagaatccggagctgttcagaaagaatgccgaagagttcaccctccgattcggagtggaccggccctcctaactcatgttctgaccctctgtgcactggatcctcggcatagcggacggacacacctcatggactgaggccagagccccctgtggcccattccccattcatttttcccttcttaggttgttagtcattagtttgtgtgtgtgtgtggtggagggaagggagctatgagtgtgtgtgttgtgtatggactcactcccaggttcacctggccacaggtgcacccttcccacaccctttacattccccagagccaagggagtttaagtttgcagttacaggccagttctccagctctccatcttagagagacaggtcaccttgcaggcctgcttgcaggaaatgaatccagcagccaactcgaatccccctagggctcaggcactgagggcctggggacagtggagcatatgggtgggagacagatggagggtaccctatttacaactgagtcagccaagccactgatgggaatatacagatttaggtgctaaaccgtttattttccacggatgagtcacaatctgaagaatcaaacttccatcctgaaaatctatatgtttcaaaaccacttgccatcctgttagattgccagttcctgggaccaggcctcagactgtgaagtatatatcctccagcattcagtccagggggagccacggaaaccatgttcttgcttaagccattaaagtcagagatgaa

SEQ ID NO: 67 - DNA, 1243 bp, Homo sapien
agcggggagaaacgttgcagcccgcgccgaacgccgggcagcacaaaggatccccgactgccggggagcggtgctcggagggcacaggtctacgccatcccccacgcagtttcggagatggagcgctgggcccatggagggaaggcggcaggggaacctgtccagcgatgatgccaatgtcctggtgtggcacgctctcctcctacccgaccaacctccctaccacctgaaagccttcaacctgcgcatcagcttcccgccggagtatccgttcaagcctcccatgatcaaattcacaaccaagatctaccaccccaacgtggacgagaacggacagatttgcctgcccatcatcagcagtgagaactggaagccttgcaccaagacttgccaagtcctggaggccctcaatgtgctggtgaatagaccgaatatcagggagcccctgcggatggacctcgctgacctgctgacacagaatccggagctgttcagaaagaatgccgaagagttcaccctccgattcggagtggaccggccctcctaactcatgttctgaccctctgtgcactggatcctcggcatagcggacggacacacctcatggactgaggccagagccccctgtggcccattccccattcatttttcccttcttaggttgttagtcattagtttgtgtgtgtgtgtggtggagggaagggagctatgagtgtgtgtgttgtgtatggactcactcccaggttcacctggccacaggtgcacccttcccacaccctttacattccccagagccaagggagtttaagtttgcagttacaggccagttctccagctctccatcttagagagacaggtcaccttgcaggcctgcttgcaggaaatgaatccagcagccaactcgaatccccctagggctcaggcactgagggcctggggacagtggagcatatgggtgggagacagatggagggtaccctatttacaactgagtcagccaagccactgatgggaatatacagatttaggtgctaaaccgtttattttccacggatgagtcacaatctgaagaatcaaacttccatcctgaaaatctatatgtttcaaaaccacttgccatcctgttagattgccagttcctgggaccaggcctcagactgtgaagtatatatcctccagcattcagtccagggggagccacggaaaccatgttcttgcttaagccattaaagtcagagatgaa

SEQ ID NO: 68 - DNA, 1507 bp, Homo sapien
gggggtggggtccccggggcggggcggggcgcgctgtgtcgcgggtcggagctcggtcctgctggaggccacgggtgccacacactcggtcccgacatgatggcgagcatgcgagtggtgaaggagctggaggatcttcagaagaagcctcccccatacctgcggaacctgtccagcgatgatgccaatgtcctggtgtggcacgctctcctcctacccgaggcagaggttgcggtgagccgagatcacgccattgcactccagcctgggcagcaaagtgaaactccatctcaaaaaaaaaaaaaaaaagaagcttggcaccagcatctccttctgatgaggccctcaggaagcttccactcatggtggaaggcaaaggggagccacgtgtacagatcacattgcaagagaagaagtgaaagagagagagagcgagcaggtgccaggatcttctaaacaaccagctttttcagaccaacctccctaccacctgaaagccttcaacctgcgcatcagcttcccgccggagtatccgttcaagcctcccatgatcaaattcacaaccaagatctaccaccccaacgtggacgagaacggacagatttgcctgcccatcatcagcagtgagaactggaagccttgcaccaagacttgccaagtcctggaggccctcaatgtgctggtgaatagaccgaatatcagggagcccctgcggatggacctcgctgacctgctgacacagaatccggagctgttcagaaagaatgccgaagagttcaccctccgattcggagtggaccggccctcctaactcatgttctgaccctctgtgcactggatcctcggcatagcggacggacacacctcatggactgaggccagagccccctgtggcccattccccattcatttttcccttcttaggttgttagtcattagtttgtgtgtgtgtgtggtggagggaagggagctatgagtgtgtgtgttgtgtatggactcactcccaggttcacctggccacaggtgcacccttcccacaccctttacattccccagagccaagggagtttaagtttgcagttacaggccagttctccagctctccatcttagagagacaggtcaccttgcaggcctgcttgcaggaaatgaatccagcagccaactcgaatccccctagggctcaggcactgagggcctggggacagtggagcatatgggtgggagacagatggagggtaccctatttacaactgagtcagccaagccactgatgggaatatacagatttaggtgctaaaccgtttattttccacggatgagtcacaatctgaagaatcaaacttccatcctgaaaatctatatgtttcaaaaccacttgccatcctgttagattgccagttcctgggaccaggcctcagactgtgaagtatatatcctccagcattcagtccagggggagccacggaaaccatgttcttgcttaagccattaaagtcagagatgaa

SEQ ID NO: 69 - DNA, 1279 bp, Homo sapien
cagcggccggccgcggggcctttttgtcctgagggccagagaaatggagaagggggtggggggacagccacgtggccgcaggaggatttacaacattttctttcgccatcgatgttatcgcaaaatgtgtgagagaagcggctgcgcagcccggacgggagcgtgagggtgcgggccaggtaagcagccccggcggtttcgccgcatacgggactgcggggcgaccgcgggcaccagccacgcgcagcggctccgcggggtctcggccgggtccgcgctctgaaggatctcgagagccatggatggtgcaggcgggaccctcgagctgcagcatctccggtgacccggggttgccgaggaggtggagaccagcacaggtggtccggcccgggcgcctccgaatccgggggtggtcaagacggatccccaaggctgaggtcggcagtcccggggactcgcagctgttgagcctgtggagacgcggccccgtgaccgaggcacccttcagcaacccgggggcagcgttccagagactgaacttctcaaatcactgcttcaacagcttttaaaaatctggacctagttactcctgtcatctatgtgtaaagatttagaaaaaaaatcccaaacccaagggtgggcagccgcgaggatgtacagctcctggcagtgtgcgctcacccggagacctgaggtcaaagcccaaatgctgagcacctcctgggaggcgggagcatggtctgctcagtgccagacatctggatattgagaaaacatctgggtagctggggttttcaggtttctgcctgacatttaatatcacaaacattgagcctgctcctgtcccccaccagccacgcggcttctcctcccaaacatacccagctccttcccctgccttcctgacgggtaagaaacatccattctttccaattccccagcgttttccccctaccggaaatctgatgggcttatgacatcatggctggctgctgagcgatgaagtggatgccacaaagaaatccgacatatcagatagattctgaaatcggtttccctccagctgtagtaacaggcgtgaagtcaggagaatttgagctttgtttaaaaaataaataaataaataaataaaccataacaaagtcttgccctgtattaaatgcaattttcttaaaaacaagcaaaccttttggacatcattttattttaatagaaatgctgagttttatgaaactaaagtggctaataaatcagacctgaagctttgtgtgagtgttcc

SEQ ID NO: 70 - DNA, 517 bp, Homo sapien
cagcggccggccgcggggcctttttgtcctgagggccagagaaatggagaagggggtggggggacagccacgtggccgcaggaggatttacaacattttctttcgccatcgatgttatcgcaaaatgtgtgagagaagcggctgcgcagcccggacgggagcgtgagggtgcgggccagcgttttccccctaccggaaatctgatgggcttatgacatcatggctggctgctgagcgatgaagtggatgccacaaagaaatccgacatatcagatagattctgaaatcggtttccctccagctgtagtaacaggcgtgaagtcaggagaatttgagctttgtttaaaaaataaataaataaataaataaaccataacaaagtcttgccctgtattaaatgcaattttcttaaaaacaagcaaaccttttggacatcattttattttaatagaaatgctgagttttatgaaactaaagtggctaataaatcagacctgaagctttgtgtgagtgttcc

SEQ ID NO: 71 - DNA, 736 bp, Homo sapien
  misc_feature (46)..(46): n=a, c, g or t
gctccccaaagggtacctgcttctgctggcttaatgcctcagaacnttggtgtcattggtctcagacaccactttgccatccactatccggcgggtggtggtctttgggatggtttgcatggagttgctgctgtccaaggcatcaccaagattaaagtcctcgccatctacagcttctgctcccagatctgtgacccccggacgaccggcgcgttctggcagacgtggaaggactttgaggtccggcatggcaatgaggacaccatcaaggaaatgctgcgtatccggcgcagcgtgcaggccacgtacaacacgcaggtcaacttcatggcctcgcagatgctcaaggtctcgggcagtgccacgggcaccgtgtctgacctggcccctgggcagagtggcatggacgacatgaagctgctggaacagcgggcagagcagctggcggctgaggcggagcgtgaccagcccttgcgcgcccagagcaagatcctgttcgtgaggagtgacgcctcccgggaggagctggcagagctggcacagcaggtcaaccccgaggagatccagctgggcgaggacgaggacgaggacgagatggacctggagcccaacgaggttcggctggagcagcagagcgtgccagccgcagtgtttgggagcctgaaggaagactgacccgtccctcccccatcccccctccccaccccctccccaatacagctacgtttgtacatca

SEQ ID NO: 72 - DNA, 3041 bp, Homo sapien
aatgatagatcactataggggaatgggtcctctaatgctgctcgagcggcgcagtgtgatggatcgtggtcgcggcgaggtaccagtattctccacagaaccagcatgtagagcagcagccacactacacccacaaaccaactctggaatacagtccttttcccatacctccccagtcccccgcttatgaaccaaacctctttgatggtccagaatcacagttttgcccaaaccaaagcttagtttcccttcttggtgatcaaagggaatctgagaatattgctaatcccatgcagacttcctccagtgttcagcagcaaaatgatgctcacttgcacagcttcagcatgatgcccagcagcgcctgtgaggccatggtggggcacgagatggcctctgactcttcaaacacttcactgccattctcaaacatgggaaatccaatgaacaccacacagttagggaaatcactttttcagtggcaggtggagcaggaagaaagcaaattggcaaatatttcccaagaccagtttctttcaaaggatgcagatggtgacacgttccttcatattgctgttgcccaagggagaagggcactttcctatgttcttgcaagaaagatgaatgcacttcacatgctggatattaaagagcacaatggacagagtgcctttcaggtggcagtggctgccaatcagcatctcattgtgcaggatctggtgaacatcggggcacaggtgaacaccacagactgctggggaagaacacctctgcatgtgtgtgctgagaagggccactcccaggtgcttcaggcgattcagaagggagcagtgggaagtaatcagtttgtggatcttgaggcaactaactatgatggcctgactccccttcactgtgcagtcatagcccacaatgctgtggtccatgaactccagagaaatcaacagcctcattcacctgaagttcaggagcttttactgaagaataagagtctggttgataccattaagtgcctaattcaaatgggagcagcggtggaagcgaaggatcgcaaaagtggccgcacagccctgcatttggcagctgaagaagcaaatctggaactcattcgcctctttttggagctgcccagttgcctgtcttttgtgaatgcaaaggcttacaatggcaacactgccctccatgttgctgccagcctgcagtatcggttgacacaattagatgctgtccgcctgttgatgaggaagggagcagacccaagtactcggaacttggagaacgaacagccagtgcatttggttcccgatggccctgtgggagaacagatccgacgtatcctgaagggaaagtccattcagcagagagctccaccgtattagctccattagcttggagcctggctagcaacactcactgtcagttaggcagtcctgatgtatctgtacatagaccatttgccttatattggcaaatgtaagttgtttctatgaaacaaacatatttagttcactattatatagtgggttatattaaaagaaaagaagaaaaatatctaatttctcttggcagatttgcatatttcatacccaggtatctgggatctagacatctgaatttgatctcaatggtaacattgccttcaattaacagtagcttttgagtaggaaaggactttgatttgtggcacaaaacattattaatatagctattgacagtttcaaagcaggtaaattgtaaatgtttctttaagaaaaagcatgtgaaaggaaaaaggtaaatacagcattgaggcttcatttggccttagtccctgggagttactggcgttggacaggcttcagtcattggactagatgaaaggtgtccatggttagaatttgatctttgcaaactgtatataattgttatttttgtccttaaaaatattgtacatacttggttgttaacatggtcatatttgaaatgtataagtccataaaatagaaaagaacaagtgaattgttgctatttaaaaaaattttacaattcttactaaggagtttttattgtgtaatcactaagtctttgtagataaagcagatggggagttacggagttgttcctttactggctgaaagatatattcgaattgtaaagatgctttttctcatgcattgaaattatacattatttgtagggaattgcatgcttttttttttttttctcccgagacagggtcttgctctggcgcccaggctggagtacagtggcatgatcttggctcacttcagccttgacttgggctcaagtgatcctcctacctgagccttctgagtaactgggactacaggtgtgcactcctcgcctggctaattttttattttttgtacaggcaggatcttgccaccttgcccaggctggtcttgaactcctgagctcatgccatctgcctgccttagtctcccaaaatgctgggattacaggagtgagccaccatgcccggctggcagttgcatggaagagaacacctctttatggcttaccctctagaatttctaatttatgtgttctgttgaaatttttgtttttttacctttattgaaacaacaaaaagtcagtattgaaacatatcttcctgttttctgttgtcaaatgatgataatgtgccatgatgttttatatatatcattcagaaaaagttttattttttaataacattctattaacattattttgcttgccgctggcatgcctgaggaatgtatttggctttgattacacactaagtttttgtaataaatttgactcattaaaaaccttttttttttaaaaaaaaaaaaaagaaaatctcattagtgaacttatctttgcagctgagtacttaaattctttttaaaaagataccctttggattgatcacattgtttgacccagtatgtcttgtagacacgttagttataatcaccttgtatctctaaatatggtgtgatatgaaccagtccattcacattggaaaaactgatggttttaaataaactaattcactaatattatttgtctta

SEQ ID NO: 73 - DNA, 1193 bp, Homo sapien
acatccagctgcctgagaccctcctgcagccttctcaagggacagccccactctgcctcttgctcctccagggcagcaccatgcagcccctgtggctctgctgggcactctgggtgttgcccctggccagccccggggccgccctgaccggggagcagctcctgggcagcctgctgcggcagctgcagctcaaagaggtgcccaccctggacagggccgacatggaggagctggtcatccccacccacgtgagggcccagtacgtggccctgctgcagcgcagccacggggaccgctcccgcggaaagaggttcagccagagcttccgagaggtggccggcaggttcctggcgttggaggccagcacacacctgctggtgttcggcatggagcagcggctgccgcccaacagcgagctggtgcaggccgtgctgcggctcttccaggaatgtacattgacctgcaggggatgaagtgggccgagaactgggtgctggagcccccgggcttcctggcttatgagtgtgtgggcacctgccggcagcccccggaggccctggccttcaagtggccgtttctggggcctcgacagtgcatcgcctcggagactgactcgctgcccatgatcgtcagcatcaaggagggaggcaggaccaggccccaggtggtcagcctgcccaacatgagggtgcagaagtgcagctgtgcctcggatggtgcgctcgtgccaaggaggctccagccataggcgcctagtgtagccatcgagggacttgacttgtgtgtgtttctgaagtgttcgagggtaccaggagagctggcgatgactgaactgctgatggacaaatgctctgtgctctctagtgagccctgaatttgcttcctctgacaagttacctcacctaatttttgcttctcaggaatgagaatctttggccactggagagcccttgctcagttttctctattcttattattcactgcactatattctaagcacttacatgtggagatactgtaacctgagggcagaaagcccaatgtgtcattgtttacttgtcctgtcactggatctgggctaaagtcctccaccaccactctggacctaagacctggggttaagtgtgggttgtgcatccccaatccagataataaagactttgtaaaacatgaataaaacacattttattcta

SEQ ID NO: 74 - DNA, 1725 bp, Homo sapien
ttttttttcacctaaattgtttttacttgcttcaccttaaatcagttattcggttcctttgaagaacatgtagctttagcaacccccaaagtgaacccagatacccagaactactgattgttacatcagagtttttgaaaacgccaatactggaaacaggccgacagttaaggagaggcaggcctcaaactaaagcagaaccttctcaaaactacttatatttcaagagatggattaagcgaaaagagctgtacaaagaaataagccattttctatgcgcctgttatatgcaaggcactgcactcccttgtcacttgttaatttacaagaagactcgccggtccagggaagggagaggggaataggtgcaaggtttgtggagggcggcaaactgcactccatgtggcgcgaggctgcgcttgcggagatccgggttctggtgcctggcgccggcagccagtaggggcgcgcgtcctgcgcagttgccgcgcgcggcctcctcgggcttcaggccgggccaatcaggaggcgggcgggagggggcgcggtaccaggagggaacgggacgggtcgggcttcgaggtcagctggtccgcagggaagcctttggcttccccaccggcaatggagcggttgacgttgcctctcggcggcgcggcggcggtggacgagtacctggagtaccggaggtataaacaacataaaactgacttggaagcgattcctcagcagtgccccattgatctgccctgccaagtgactggctgccagtgcagggcttacctttatgtccccttgaatggtagccagcccattcgctgcaggtgcaaacactttgctgatcagcacagtgctgcgcctggctttacatgcaatacatgttccaagtgttcaggattccatagctgcttcacttgtgcttgtggtcagcctgcatatgcccatgacacagtagtggaaactaagcaagaaagattggctcaggaaaaaccagtgggacaggacattccttatgcagccatgggaggattaactggtttcagctcgctggcggaaggctacatgcggttagatgacagtgggattgtaggtacaagtagtcaagtttcttcattaaggagacctgaagaggatgatatggctttctttgaaagacgataccaggaaaggatgaaaatggaaaaggctgctaagtggaaaggaaaagctccattgccatcagctacaaaaccttcatgaagactattggagaaattaaaaccatcatccaagtatctttttcatgtttatttaaatgtaataatacagtttatttttcctgaaattatttactttttttttttactgtataaatgtcttttgggatgtttccttaatttatttaaataactaaaaatgtctattacttttgtcaaaactcataatttactactttgtatgtacctttctttctcctgacaaatgaggttattttatatgagtctgtctgagagtacagtaaatgtttttagtacataataatttaactgtttcaggtatttaaaaaattaaagatattatcaagggttttggacaaacatatgagccatttttttgtcattcaaaatagtaagttaaaaacaagagaacaaaagaaaaaaatagttaaaatcattaatttttttatttttcaaactttgtaatgttatgttttcaaataaaaactatctcaaaattttacaacca

SEQ ID NO: 75 - DNA, 670 bp, Homo sapien
ggaggttcaggaagccattttctttcgcgtctgcggtgctcggagtgtggtacttctcctagttgcagtcaggcttcatacgctattgtcctgcccgttagagcagccagcgggtacagaatggattttggaagagggagtcaccactggacctccaaggaagccacgtgcagacatctacaaccttcgatctcctgacgagtttattgttggccaaaaccaggctttgattgaaccaggatgaatgcgggtgttggaagtagaatatatatatacatataaaattggttgggagccacgtgtaccagtgtgtgttgatcttggcttgattcagtctgccttgtaacagaaactggcgatggaatatgagaggagccctctggaaagaaaaggacagaccctgtgctttcatgaaagtgaagatctggctgaaccagttccacaaggttactgtatacatagcctgagtttaaaaggctgtgcccacttcaagaatgtcattgttagactttgaaatttctaactgcctacctgcataaagaaaataaaatcttttaaatcaaaaaaaaaacaaaaacaaaaaaacttgtggtggggggccttgggccccggaaaaggttttttaacccttccgttggggggggggggccccttggtttgcggccccctg

SEQ ID NO: 76 - DNA, 964 bp, Homo sapien
ggaggttcaggaagccattttctttcgcgtctgcggtgctcggagtgtggtacttctcctagttgcagtcaggcttcatacgctattgtcctgcccgttagagcagccagcgggtacagaatggattttggaagagggagtcaccactggacctccaaggaagccacgtgcagacatctacaaccttcgatctcctgacgagtttattgttggccaaaaccaggctttgattgaaccaggatgaatgcgggtgttggaagtagaatatatatatacatataaaattgaaactggcgatggaatatgagaggagccctctggaaagaaaaggacagaccctgtgctttcatgaaagtgaagatctggctgaaccagttccacaaggttactgtatacatagcctgagtttaaaaggctgtgcccacttcaagaatgtcattgttagactttgaaatttctaactgcctacctgcataaagaaaataaaatcttttaaatcaaaaaaaaaaaaaagggggggccgccctttttttttttttttttgggaggtccccaacaattcttgggtaattctttccccaaaaggtaaatatacccgaagggtttttaaagttccacaaaaaaaaccttatttgggttccttccccaaagaaaaaaaaaatacatgagagcaacagcccagcccgatagacagcacagagacaactcgcaaccaacaagtccgcccaacgacaagcagaaacaaaaggagggcggcgagccaacacatcagcaaggcgacaagacccacagccaagaggcaggcggccgacagtgacataacaacgagcggccccacggcaacgacaaccgacgataagaacgacgtgtgtgaagacacaccccaccgccgaacgacgggatggcaccagcgagacctatagtacgcgaagcagccaagacgaagagcggggaagcaaggaaa

SEQ ID NO: 77 - DNA, 269 bp, Homo sapien
cctctctggcggcggctgctgctagggagtcgacttctcctgccttgtaacagaaactggcgatggaatatgagaggagccctctggaaagaaaaggacagaccctgtgctttcatgaaagtgaagatctggctgaaccagttccacaaggttactgtatacatagcctgagtttaaaaggctgtgcccacttcaagaatgtcattgttagactttgaaatttctaactgcctacctgcataaagaaaataaaatcttttaaatcaaaa

SEQ ID NO: 78 - DNA, 928 bp, Homo sapien
  misc_feature (855)..(855): n=a, c, g or t
ggaggttcaggaagccattttctttcgcgtctgcggtgctcggagtgtggtacttctcctagttgcagtcaggcttcatacgctattgtcctgcccgttagagcagccagcgggtacagaatggattttggaagagggagtcaccactggacctccaaggaagccacgtgcagacatctacaaccttcgatctcctgacgagtttattgttggccaaaaccaggctttgattgaaccaggatgaatgcgggtgttggaagtagaatatatatatacatataaaattggttgggagccacgtgtaccagtgtgtgttgatcttggcttgattcagtctgccttgtaacagaaactggcgatggaatatgagaggagccctctggaaagaaaaggacagaccctgtgctttcatgaaagtgaagatctggctgaaccagttccacaaggttactgtatacatagcctgagtttaaaaggctgtgcccacttcaagaatgtcattgttagactttgaaatttctaactgcctacctgcataaagaaaataaaatcttttaaatcaaaaaaaaaaaccaaaaaaaatatctataaacacaaagaaaaacaaattcaaacttacacattatccaatcattctattattataaatatatgaaaaaaaaaaaaacttgggggcccgcttggcccagggggttttaaatctggaccaatttattcttggggcccaatttggggctcattttggccaattgcccctttaggggaggcgtttacaattcatgggccggtttttcaaacggtggtatttggaaaacccctggggttacccaatttttaaacccttgggaaaaaatncccttttttcacagtggggggaaattccgaaggccccgccccgtgaggccttttccatttggcccctctttgg

SEQ ID NO: 79 - DNA, 2448 bp, Homo sapien
tttttttttttcactagtagcattgttaatattaaacaagatagctaatagctttaaagcgtctaatcacggtacccccacgagtagtagtcacacagcaaatcataggcaggagtggacaaacagcgctgggagcattaattctggtagatttggagtctgggcagggcctaagaggatgggatcagcggattgggccagccaaagggggcgggttcagagggaggagccagctgcctcccgctgcaagccccgagctttgaatcaagcgcggtagtttcagctgtagccaatcctagaacaaaatctttttgcgtcagttgttgctgaggcctagatctcacccagatcagttctagtcgctgctgcttgtacccgtcctcggcccttgcgtgtccgtccgttacgactcagaggacggagagaaagtctaagtcaccttcctcagtatccaggccggaaggagactctcagctactcgccctgaacatgcagagcagcactggcttccctgtctctggatgccgcaggggcgtcctgtcaggagttgtagtgtcaagattccagttcttcttatgcgacttgctggagaagcaggaagttgctgtttattggagaagtcgggctagggagggaaacaatcccgcggagccatatggagagggcaggaggtgtctagatagtggtaggccggcgggggacggagggtatgggtggtgagtcctggccctttaaacccgagggggaggatccggaagtggatgggcggggcgaagggtcctcgtatataaaagggccccggccgcgcggggtctctaatctgccattttctgtccctgagtgagtctctggcgtcccaaattgcctgtttttctcgcaggctctattccgttcgctggttcgccacctcaggggaacgatggccatggagtccacagccactgccgccgtcgccgcggagctggtttctgccgacaaaattgaagatgttcctgctccttctacatctgcagataaagtggagagcaaccattaatctgctttctgtcactgaagatgggttgcattttgtagaatattatctaaatagaatcatacatctggatgtggatagtgaagctaagaaactattgggtttaggacagaaacatctggtgatgggggatattccagcagctgtcaatgcattccaggaagcagctagtcttttaggtaagaagtatggagagacagctaatgagtgtggagaagccttctttttctatgggaaatcacttctggagttggcaagaatggagaatggtgtgttgggaaacgccttggaaggtgtgcatgtggaagaggaagaaggagaaaaaacagaagatgaatctctggtagaaaataatgataacatagatgaaactgaaggctcggaagaggatgataaagaaaatgataagactgaagaaatgccaaatgattcagtccttgaaaacaagtctcttcaagaaaatgaggaggaggagattgggaacctagagcttgcctgggatatgctggatttagcaaagatcatttttaaaaggcaagaaacaaaagaagcacagctttatgctgcccaggcacatcttaaactcggagaagttagtgttgaatctgaaaactatgtgcaagctgtggaggagttccagtcctgccttaacctgcaggaacagtacctggaagcccacgaccgtctccttgcagagacccactaccagctgggcttggcttatgggtacaactctcagtatgatgaggcagtggcacagttcagcaaatctattgaagtcattgagaacagaatggctgtactaaacgagcaggtgaaggaggctgaaggatcgtctgctgaatacaagaaagaaattgaggaactaaaggaactgctacccgaaattagagagaagatagaagatgcaaaggagtctcagcgtagtgggaatgtagctgaactggctctgaaagctactctggtggagagttctacttcaggtttcactcctggtggaggaggctcttcagtctccatgattgccagtagaaagccaacagacggtgcttcctcatcaaattgtgtgactgatatttcccaccttgtcagaaagaagaggaaaccagaggaagagagtccccggaaagatgatgcaaagaaagccaaacaagagccggaggtgaacggaggcagtggggatgctgtccccagtggaaatgaagtttcggaaaacatggaggaggaggctgagaatcaggctgaaagccgggcagcagtggaggggacagtggaggctggagctacagttgaaagcactgcatgttaagagggggcacagccctcctcccaagggaaagtgtttttgtatataatgtattttttcacttttggaggattctttttgtataacttcaataaagattgtaagcaaa

SEQ ID NO: 80 - DNA, 1648 bp, Homo sapien
tgacgcgaatgacgctgcgccagtcaggccgcagccccgctgcttggcccgtcgggcccgccttggccggctcggcccgcccccggccctccctgcacggcctcccgtgcgcccctgtcagactgtggcggccggtcgcgcggtgcgctctccctccctgcccgcagcctggagaggcgcttcgtgctgcacacccccgcgttcctgccggcaccgcgcctgccctctgccgcgctccgccctgccgccgaccgcacgcccgccgcgggacatggcacacgcaccggcacgctgccccagcgcccggggctccggggacggcgagatgggcaagcccaggaacgtggcgctcatcaccggtatcacaggccaggatggttcctacctggctgagttcctgctggagaaaggctatgaggtccatggaattgtacggcggtccagttcatttaatacgggtcgaattgagcatctgtataagaatccccaggctcacattgaaggaaacatgaagttgcactatggcgatctcactgacagtacctgccttgtgaagatcattaatgaagtaaagcccacagagatctacaaccttggagcccagagccacgtcaaaatttcctttgacctcgctgagtacactgcggacgttgacggagttggcactctacgacttctagatgcagttaagacttgtggccttatcaactctgtgaagttctaccaagcctcaacaagtgaactttatgggaaagtgcaggaaataccccagaaggagaccacccctttctatccccggtcaccctatggagctaatttcgttactcgaaaaattagccggtcagtagctaagatttaccttggacaactggaatgtttcagtttgggaaatctggatgccaaacgagattggggccatgccaaggactatgtggaggctatgtggttgatgttgcagaatgatgagccggaggacttcgttatagctactggggaggtccatagtgtccgggaatttgtcgagaaatcattcttgcacattggaaaaaccattgtgtgggaaggaaagaatgaaaatgaagtgggcagatgtaaagagaccggcaaagttcacgtgactgtggatctcaagtactaccggccaactgaagtggactttctgcagggcgactgcaccaaagcgaaacagaagctgaactggaagccccgggtcgctttcgatgagctggtgagggagatggtgcacgccgacgtggagctcatgaggacaaaccccaatgcctgagcagcgcctcggagcccggcccgccctccggctacaatccccgcagagtctccggtgcagacgcgctgcggggatggggagcggcgtgccaatctgcgggtcccctgcggcccctgctgccgctgcgctgtcccggccgcaagagcggggccgccccgccgaggtttgtagcagccgggatgtgaccctccagggtttgggtcgctttgcgtttgtcgaagcctcctctgaatggctttgtgaaatcaagatgttttaatcacattcactttacttgaaattatgttgttacacaacaaattgtggggccttcaaattgtttttctcttttcatattaaaaatggtctttctgtgaactagca

SEQ ID NO: 81 - DNA, 2595 bp, Homo sapien
tgacgcgaatgacgctgcgccagtcaggccgcagccccgctgcttggcccgtcgggcccgccttggccggctcggcccgcccccggccctccctgcacggcctcccgtgcgcccctgtcagactgtggcggccggtcgcgcggtgcgctctccctccctgcccgcagcctggagaggcgcttcgtgctgcacacccccgcgttcctgccggcaccgcgcctgccctctgccgcgctccgccctgccgccgaccgcacgcccgccgcgggacatggcacacgcaccggcacgctgccccagcgcccggggctccggggacggcgagatgggcaagcccaggaacgtggcgctcatcaccggtatcacaggccaggatggttcctacctggctgagttcctgctggagaaaggctatgaggtccatggaattgtacggcggtccagttcatttaatacgggtcgaattgagcatctgtataagaatccccaggctcacattgaaggaaacatgaagttgcactatggcgatctcactgacagtacctgccttgtgaagatcattaatgaagtaaagcccacagagatctacaaccttggagcccagagccacgtcaaaatttcctttgacctcgctgagtacactgcggacgttgacggagttggcactctacgacttctagatgcagttaagacttgtggccttatcaactctgtgaagttctaccaagcctcaacaagtgaactttatgggaaagtgcaggaaataccccagaaggagaccacccctttctatccccggtcaccctatggggcagcaaaactctatgcctattggattgtggtgaacttccgtgaggcgtataatctctttgcagtgaacggcattctcttcaatcatgagagtcccagaagaggagctaatttcgttactcgaaaaattagccggtcagtagctaagatttaccttggacaactggaatgtttcagtttgggaaatctggatgccaaacgagattggggccatgccaaggactatgtggaggctatgtggttgatgttgcagaatgatgagccggaggacttcgttatagctactggggaggtccatagtgtccgggaatttgtcgagaaatcattcttgcacattggaaaaaccattgtgtgggaaggaaagaatgaaaatgaagtgggcagatgtaaagagaccggcaaagttcacgtgactgtggatctcaagtactaccggccaactgaagtggagaccaattaattgttcaaaggtaatatatagagatctcaagagcatttactttggcacagtctctgcccctttgtggtctggctaacaataaagctaagatttgttttgtaatgacggttccagttggactggaattcctttgaagttcctgaagtttgctgttgtgagagctcaagatattatttgactgcaatgaaacactctctgtgtattatcaaaatatcgtatacactgaactgtaacaacttgcagtaatcagacttctccttcgaggtggcctgcgtgagtagagagcatccacagagagatgagcttctcccaacatccatttagtgttcagtcatcacgggccactcatggatctgaaccttcttacaaggtcgataccaacaggtatgaggagcagagagcagatcagcacggagcagcattagctggggcctccttgcctggcctggcagtgaagatagagcaccatgccagttgttcagcttctcagcgcttgcatcagctgacctaaattatttaaggatgttgtcacctctaaataaatatagtcattgtcctggtctctatttatattttaaaactctttcccagcccaccccgatggcctaaaacaattcatatacttcagtagaagagggtgtcacagggctatttgcacaggtttggatccagtgccagcgttagccttcacacaagttacactcctctgagatgtaactgtctcctgtgtatgagtgccaaagtatttgataaccgccatctgtctgctctcaacacaggtttcacaagcacagtgatgtcttccattgtgtgcgtaacaactgtgtgtgtgcggagagagaggactctgtacgcatgcacatgtttggagctacataaatctgagaagcagttttgtctagtgtcgtttcagtaaatgggactcatttagtcagtttgctttgctgtcagaatcatattccagatatcagaatgtgctatggcaggtacttgtttaaaacaagtaataatatccttgtaatgtttagcaatacagctgactggtctgtgttccattacttgtgtaaaaggaaatatgtaaagcttttaaaaataagtttaaatgatcaaaagagatgcctgaaaatatattttggcacaggaaattacaggaatttataaatgtgtcatgtggaaagataattacaaagtttattttaatcttttatctctgactgaatcttaagttaaaatattcttcccggcatcctgtctggtttttgccactgtccctgctttacgtgttacctttccatgttgatctgagttgcatttagttgaggaga

SEQ ID NO: 82 - DNA, 1706 bp, Homo sapien
tgacgcgaatgacgctgcgccagtcaggccgcagccccgctgcttggcccgtcgggcccgccttggccggctcggcccgcccccggccctccctgcacggcctcccgtgcgcccctgtcagactgtggcggccggtcgcgcggtgcgctctccctccctgcccgcagcctggagaggcgcttcgtgctgcacacccccgcgttcctgccggcaccgcgcctgccctctgccgcgctccgccctgccgccgaccgcacgcccgccgcgggacatggcacacgcaccggcacgctgccccagcgcccggggctccggggacggcgagatgggcaagcccaggaacgtggcgctcatcaccggtatcacaggccaggatggttcctacctggctgagttcctgctggagaaaggctatgaggtccatggaattgtacggcggtccagttcatttaatacgggtcgaattgagcatctgtataagaatccccaggctcacattgaaggaaacatgaagttgcactatggcgatctcactgacagtacctgccttgtgaagatcattaatgaagtaaagcccacagagatctacaaccttggagcccagagccacgtcaaaatttcctttgacctcgctgagtacactgcggacgttgacggagttggcactctacgacttctagatgcagttaagacttgtggccttatcaactctgtgaagttctaccaagcctcaacaagtgaactttatgggaaagtgcaggaaataccccagaaggagaccacccctttctatccccggtcaccctatggggcagcaaaactctatgcctattggattgtggtgaacttccgtgaggcgtataatctctttgcagtgaacggcattctcttcaatcatgagagtcccagaagaggagctaatttcgttactcgaaaaattagccggtcagtagctaagatttaccttggacaactggaatgtttcagtttgggaaatctggatgccaaacgagattggggccatgccaaggactatgtggaggctatgtggttgatgttgcagaatgatgagccggaggacttcgttatagctactggggaggtccatagtgtccgggaatttgtcgagaaatcattcttgcacattggaaaaaccattgtgtgggaaggaaagaatgaaaatgaagtgggcagatgtaaagagaccggcaaagttcacgtgactgtggatctcaagtactaccggccaactgaagtggtaaggactctctggccacccagtgcgtggccacgtttggctggctggctgggcaaatgcgctcatggaatgcctggtgccagcctttggagctgtcagttcagctccctggcatccttcagcgtgcatttccaaaatcagaacacagtgaattcaatttgagattatcattcttaccacaaacttcattgctctataaaggaaaacaagagttaaacccaccaaaagaaatcattgatttcagaaatggaatctcacatcacacgcagatctcctcatgttggtctcctattctaatggctggtccctgataacctacaggatgcctgacttaacaacgctgtcccagacctgcaggacatctaggtcctctccagctatgtctatgtctgtgtctgtgtactcatacacagtgcatacttgcacactataccataaatggtctccc

SEQ ID NO: 83 - DNA, 2667 bp, Homo sapien
ttggttttttttttttttttgcttttttgttttttgagacagggtcttgctctgttgcccaggctggggtgcagtggcgagatctcagttcactgcaacctccacatcccggctttaaccgattctcccatctcagcctcacgagtagctgggattacagggctgcatcaacacacctggctaatttttgtatttttagtacagatggggtttcaccatgttggccaggctggtctcaaactcctgacctcaggtgatctgccagcttcagcctcccaaagtgctgggattacaggcgtgagctaccacgcctggccttggccatgtagatttctttcacaccttccttattccttcttcagaagctgaggccccatgaggggaagctggtagccaggggtcttttcaggtacctgtggccaaattaggcccagatgttaatgctctcatccatggctgaaaaaggccaagaaactaagaagagctgtggacgcacagactggcagagacaccgagagggcactgcgaccgcactgcacagatgagcaaaggaaggccaacttcagcattccctcctcctctctaagcccctccaaaaggcctgctcagggagctctggccaccgttctcaagcaattgcctgacgtttttactgacactgagggctggagatggtcccttttccaggcagctatgtgtccatttcctagagagggaaactgagtcccagagaaggcgggtgtggctggaggccatgggtcagtcataggcataaccatgccgtgaataaccgtcttggcactctctgacttctttccctggcaatacaacggatcccagtgcccatttgtcacataaggaaactgaggctggcgtcttcgatgaagcctggcaggagtgggggtcacacacggagtgcaaggctgtccaagccttcaaggtcattctgactgatctttgagccttagcaatacaggacgtgggtccaagagcatttccagcacaaaatggcgcctcatagaaaaatgtagtcggagttccagcgcccacctccaccacggctcaaaggagggggcgcgggcggcagcgcacacttcatttgcatatacaaaaatcaacggatttcgttggctggcagcggtttgatctgcacgaaactgggtcgccctctgaccggtctctatcagtcattggcccatgcgagtctcgtgacccaccagtcactaaagcgcatccctattggcccgagcgccttccatcacgcgtttaaaaccccgagtcccgcctcccctcgccacgctccggcccccaggaagaccgttagtcgcgtgcgcgacttcctcagcgtcagggcgcgcccgcgcgtatgccgggccgtggcggcgtctcattcaaacggtccaatcagcggccgcgtcgccttccccgtcccccttcctctcttcttccccttttcagcccctccgttctttgagaaccctcccgacccccgcgggcccccattggccggcccgctacccagccctctccgccacttccctcgcttctgaccatagtttgcggggaagggagcgagcgcgtcgaaaaccaaggaacgtgcgcgctgacgtcacggttgaggctcggagctgaggggccgcggagggcgtggcctgcgggcggttataaagaggcagtggtgcgcgcgcggccggctcagtgctgccgggcaccggggcggcgggttggtctacgctgtgcgcggcggacgtcggaggcagcggggagcggagcggggccgccggggcctctccagggccgcagcggcagcagttgggccccccgccccggccggcggaccgaagaacgcaggaagggggccggggggacccgcccccggccggccgcagccatgaactccaacgtggagaacctacccccgcacatcatccgcctggtgtacaaggaggtgacgacactgaccgcagacccacccgatggcatcaaggtctttcccaacgaggaggacctcaccgacctccaggtcaccatcgagggccctgaggggaccccatatgctggaggtctgttccgcatgaaactcctgctggggaaggacttccctgcctccccacccaagggctacttcctgaccaagatcttccacccgaacgtgggcgccaatggcgagatctgcgtcaacgtgctcaagagggactggacggctgagctgggcatccgacacgtactgctgaccatcaagtgcctgctgatccaccctaaccccgagtctgcactcaacgaggaggcgggccgcctgctcttggagaactacgaggagtatgcagctcgggcccgtctgctcacagagatccacgggggcgccggcgggcccagcggcagggccgaagccggtcgggccctggccagtggcactgaagcttcctccaccgaccctggggccccgggccggagggctgaagtccattggccagagcatgtgggaagggaaagacgttggggcagaaagacgacagacggcgcgcgcgtgaaggtctttctctcacgtgaccattctgctcccaattttagtaattgcggcccgagcgggcgccgtgtcaatgcccaaacaaaaaaaccttctcgaaaaggtgtcctcagtgctgcttttcaggcgtcgcttcttca

SEQ ID NO: 84 - DNA, 2648 bp, Homo sapien
ttggttttttttttttttttgcttttttgttttttgagacagggtcttgctctgttgcccaggctggggtgcagtggcgagatctcagttcactgcaacctccacatcccggctttaaccgattctcccatctcagcctcacgagtagctgggattacagggctgcatcaacacacctggctaatttttgtatttttagtacagatggggtttcaccatgttggccaggctggtctcaaactcctgacctcaggtgatctgccagcttcagcctcccaaagtgctgggattacaggcgtgagctaccacgcctggccttggccatgtagatttctttcacaccttccttattccttcttcagaagctgaggccccatgaggggaagctggtagccaggggtcttttcaggtacctgtggccaaattaggcccagatgttaatgctctcatccatggctgaaaaaggccaagaaactaagaagagctgtggacgcacagactggcagagacaccgagagggcactgcgaccgcactgcacagatgagcaaaggaaggccaacttcagcattccctcctcctctctaagcccctccaaaaggcctgctcagggagctctggccaccgttctcaagcaattgcctgacgtttttactgacactgagggctggagatggtcccttttccaggcagctatgtgtccatttcctagagagggaaactgagtcccagagaaggcgggtgtggctggaggccatgggtcagtcataggcataaccatgccgtgaataaccgtcttggcactctctgacttctttccctggcaatacaacggatcccagtgcccatttgtcacataaggaaactgaggctggcgtcttcgatgaagcctggcaggagtgggggtcacacacggagtgcaaggctgtccaagccttcaaggtcattctgactgatctttgagccttagcaatacaggacgtgggtccaagagcatttccagcacaaaatggcgcctcatagaaaaatgtagtcggagttccagcgcccacctccaccacggctcaaaggagggggcgcgggcggcagcgcacacttcatttgcatatacaaaaatcaacggatttcgttggctggcagcggtttgatctgcacgaaactgggtcgccctctgaccggtctctatcagtcattggcccatgcgagtctcgtgacccaccagtcactaaagcgcatccctattggcccgagcgccttccatcacgcgtttaaaaccccgagtcccgcctcccctcgccacgctccggcccccaggaagaccgttagtcgcgtgcgcgacttcctcagcgtcagggcgcgcccgcgcgtatgccgggccgtggcggcgtctcattcaaacggtccaatcagcggccgcgtcgccttccccgtcccccttcctctcttcttccccttttcagcccctccgttctttgagaaccctcccgacccccgcgggcccccattggccggcccgctacccagccctctccgccacttccctcgcttctgaccatagtttgcggggaagggagcgagcgcgtcgaaaaccaaggaacgtgcgcgctgacgtcacggttgaggctcggagctgaggggccgcggagggcgtggcctgcgggcggttataaagaggcagtggtgcgcgcgcggccggctcagtgctgccgggcaccggggcggcgggttggtctacgctgtgcgcggcggacgtcggaggcagcggggagcggagcggggccgccggggcctctccagggccgcagcggcagcagttgggccccccgccccggccggcggaccgaagaacctacccccgcacatcatccgcctggtgtacaaggaggtgacgacactgaccgcagacccacccgatggcatcaaggtctttcccaacgaggaggacctcaccgacctccaggtcaccatcgagggccctgaggggaccccatatgctggaggtctgttccgcatgaaactcctgctggggaaggacttccctgcctccccacccaagggctacttcctgaccaagatcttccacccgaacgtgggcgccaatggcgagatctgcgtcaacgtgctcaagagggactggacggctgagctgggcatccgacacgtactgctgaccatcaagtgcctgctgatccaccctaaccccgagtctgcactcaacgaggaggcgggccgcctgctcttggagaactacgaggagtatgcagctcgggcccgtctgctcacagagatccacgggggcgccggcgggcccagcggcagggccgaagccggtcgggccctggccagtggcactgaagcttcctccaccgaccctggggccccagggggcccgggaggggctgagggtcccatggccaagaagcatgctggcgagcgcgataagaagctggcggccaagaaaaagacggacaagaagcgggcgctgcggcggctgtagtgggctctcttcctccttccaccgtgaccccaacctctcctgtcccctccctccaactctgtctctaagttatttaaattatggctggggtcggggagggtacagggggcactgggacctggatttgtttttctaaataaagttggaaaagca

SEQ ID NO: 85 - DNA, 2800 bp, Homo sapien
ttggttttttttttttttttgcttttttgttttttgagacagggtcttgctctgttgcccaggctggggtgcagtggcgagatctcagttcactgcaacctccacatcccggctttaaccgattctcccatctcagcctcacgagtagctgggattacagggctgcatcaacacacctggctaatttttgtatttttagtacagatggggtttcaccatgttggccaggctggtctcaaactcctgacctcaggtgatctgccagcttcagcctcccaaagtgctgggattacaggcgtgagctaccacgcctggccttggccatgtagatttctttcacaccttccttattccttcttcagaagctgaggccccatgaggggaagctggtagccaggggtcttttcaggtacctgtggccaaattaggcccagatgttaatgctctcatccatggctgaaaaaggccaagaaactaagaagagctgtggacgcacagactggcagagacaccgagagggcactgcgaccgcactgcacagatgagcaaaggaaggccaacttcagcattccctcctcctctctaagcccctccaaaaggcctgctcagggagctctggccaccgttctcaagcaattgcctgacgtttttactgacactgagggctggagatggtcccttttccaggcagctatgtgtccatttcctagagagggaaactgagtcccagagaaggcgggtgtggctggaggccatgggtcagtcataggcataaccatgccgtgaataaccgtcttggcactctctgacttctttccctggcaatacaacggatcccagtgcccatttgtcacataaggaaactgaggctggcgtcttcgatgaagcctggcaggagtgggggtcacacacggagtgcaaggctgtccaagccttcaaggtcattctgactgatctttgagccttagcaatacaggacgtgggtccaagagcatttccagcacaaaatggcgcctcatagaaaaatgtagtcggagttccagcgcccacctccaccacggctcaaaggagggggcgcgggcggcagcgcacacttcatttgcatatacaaaaatcaacggatttcgttggctggcagcggtttgatctgcacgaaactgggtcgccctctgaccggtctctatcagtcattggcccatgcgagtctcgtgacccaccagtcactaaagcgcatccctattggcccgagcgccttccatcacgcgtttaaaaccccgagtcccgcctcccctcgccacgctccggcccccaggaagaccgttagtcgcgtgcgcgacttcctcagcgtcagggcgcgcccgcgcgtatgccgggccgtggcggcgtctcattcaaacggtccaatcagcggccgcgtcgccttccccgtcccccttcctctcttcttccccttttcagcccctccgttctttgagaaccctcccgacccccgcgggcccccattggccggcccgctacccagccctctccgccacttccctcgcttctgaccatagtttgcggggaagggagcgagcgcgtcgaaaaccaaggaacgtgcgcgctgacgtcacggttgaggctcggagctgaggggccgcggagggcgtggcctgcgggcggttataaagaggcagtggtgcgcgcgcggccggctcagtgctgccgggcaccggggcggcgggttggtctacgctgtgcgcggcggacgtcggaggcagcggggagcggagcggggccgccggggcctctccagggccgcagcggcagcagttgggccccccgccccggccggcggaccgaagaacgcaggaagggggccggggggacccgcccccggccggccgcagccatgaactccaacgtggagaacctacccccgcacatcatccgcctggtgtacaaggaggtgacgacactgaccgcagacccacccgatggcatcaaggtctttcccaacgaggaggacctcaccgacctccaggtcaccatcgagggccctgaggggaccccatatgctggaggtctgttccgcatgaaactcctgctggggaaggacttccctgcctccccacccaagggctacttcctgaccaagatcttccacccgaacgtgggcgccaatggcgagatctgcgtcaacgtgctcaagagggactggacggctgagctgggcatccgacacgtactgctgctttcctggaaagacaaacagtgccagacccaggacacccaagtactgttgagaagtgcccaggagcaccttactatgcaacgagtgaccatcaagtgcctgctgatccaccctaaccccgagtctgcactcaacgaggaggcgggccgcctgctcttggagaactacgaggagtatgcagctcgggcccgtctgctcacagagatccacgggggcgccggcgggcccagcggcagggccgaagccggtcgggccctggccagtggcactgaagcttcctccaccgaccctggggccccagggggcccgggaggggctgagggtcccatggccaagaagcatgctggcgagcgcgataagaagctggcggccaagaaaaagacggacaagaagcgggcgctgcggcggctgtagtgggctctcttcctccttccaccgtgaccccaacctctcctgtcccctccctccaactctgtctctaagttatttaaattatggctggggtcggggagggtacagggggcactgggacctggatttgtttttctaaataaagttggaaaagca

SEQ ID NO: 86 - DNA, 717 bp, Homo sapien
ccccaggggctcatcccagcctggacttgacacgttgctctctgtttttacctaaaagagccagaagcgctatcacgaagatatctttggtgctgtatttccttacgaggcgaagaaggacagggtggcggtgcagcccagcagcctggagatgtcagcgctctgagggcctacaggaggggttaaagctgccggcacagaacttaaggatggagccagctctgcattatctgaggtcacagggcctggggagatggaggaaagtgatatcccccagcctcaagtcttatttcctcaacgttgctccccatcaagccctttacttgacctcctaacaagtagcaccctggattgatcggagcctcctctctcaaactggggcctccctggtcccttggagacaaaatcttaaatgccaggcctggcaagtgggtgaaagatggaacttgctgctgagtgcaccacttcaagtgaccaccaggaggtgctatcgcaccactgtgtatttaactgccttgtgtacagttatttatgcctctgtatttaaaaaactaacacccagtctgttccccatggccacttgggtcttccctgtatgattccttgatggagatatttacatgaattgcattttactttaatcacactgtatgcgtgtgtgggtgttttgtagggaaagctcttctcagagtggggagctggtgggtgtcacagcct

SEQ ID NO: 87 - DNA, 1098 bp, Homo sapien
tgccagggagctccaacagaactgagggacgaacagtaggtgcctgagagctggccgatctggtcactctctccagtgggccacaggggcccacttggtgggcagtctctgctgccagctagggcatctcagctcagcccagagcaaagacgtgtagggacataacgctttcctcaagcttcctttcccaggtccaaacttagaggcccagttttgggcctagaattcactgaggtttgtggctgtttgtccaacagtcaccatggatcaccgaagccgactacggggcacaggcctgaaccgaatccctgggactcagtcccgagccccccgagtcccactccccttccacgtgcaacaggaggccagggaaggagaagactgggagcgagagccacctcgtcagaggcctcctatctatgagccaccagaaagtgaagagctgccagataatgttatggtttccaagccagcgccctactgggaaggaacagctgtgatcgatggagaatttaaggagctgaagttaactgattatcgtgggaaatacttggttttcttcttctacccacttgatttcacatttgtgtgtccaactgaaattatcgcttttggcgacagacttgaagaattcagatctataaatactgaagtggtagcatgctctgttgattcacagtttacccatttggcctggattaatacccctcgaagacaaggaggacttgggccaataaggattccacttctttcagatttgacccatcagatctcaaaggactatggtgtatacctagaggactcaggccacactcttagaggtctcttcattattgatgacaaaggaatcctaagacaaattactctgaatgatcttcctgtgggtagatcagtggatgagacactacgtttggttcaagcattccagtacactgacaaacacggagaagtctgccctgctggctggaaacctggtagtgaaacaataatcccagatccagctggaaagctgaagtatttcgataaactgaattgagaaatacttcttcaagttatgatgcttgaaagttctcaataaagttcacggtttcattacca

SEQ ID NO: 88 - DNA, 731 bp, Homo sapien
  misc_feature (21)..(21): n=a, c, g or t
tatagatagatatgtttatcnccataactcataactgggagtattatacccaagaggctttgttacaaggtattttttaccctgttagtaaatattttcctgtaattctataataagcaaataaattttcatggttggggtagatgcaaaaaaaaaagaattcgaattcgaattcggaacgtcatcgtttggaaagcgtcgcaataagacgcacacgttgtgccgccgctgtggctctaaggcctaccaccttcagaagtcgacctgtggcaaatgtggctaccctgccaagcgcaagagaaagtataactggagtgccaaggctaaaagacgaaataccaccggaactggtcgaatgaggcacctaaaaattgtataccgcagattcaggcatggattccgtgaaggaacaacacctaaacccaagagggcagctgttgcagcatccagttcatcttaagaatgtcaacgattagtcatgcaataaatgttctggttttaaaaaatacatatctggttttggtaaggtatttttaatcaattaggcttgtagtatcagtgaaatactgtaggtttagggactgggctagcttcatatcagatttacttgttaagtgactgttttggaatgtttacttttggactgggtttgtaacacggttaaaggcaatgagaaacaagcagaattccaggagtccttgaagcagagggcactggaagacaatatagca

SEQ ID NO: 89 - DNA, 777 bp, Homo sapien
  misc_feature (50)..(50): n=a, c, g or t
  misc_feature (90)..(90): n=a, c, g or t
  misc_feature (199)..(199): n=a, c, g or t
  misc_feature (201)..(201): n=a, c, g or t
  misc_feature (204)..(204): n=a, c, g or t
  misc_feature (206)..(206): n=a, c, g or t
atgttctttgtttgacaatctcataagactttagtcttacagacgacccntcgaagtctgctggcacacaccacatgcagattttggtgntttcccaaccttcttggtataaaggtaaacaattctattaccaggggttcgggacagcctagttttgttagaggctgtattgtaggaaagcctacgtcggtatgtcaananctntncgaattcggccgaggggaacgtcatcgtttggaaagcgtcgcaataagacgcacacgttgtgccgccgctgtggctctaaggcctaccaccttcagaagtcgacctgtggcaaatgtggctaccctgccaagcgcaagagaaagtataactggagtgccaaggctaaaagacgaaataccaccggaactggtcgaatgaggcacctaaaaattgtataccgcagattcaggcatggattccgtgaaggaacaacacctaaacccaagagggcagctgttgcagcatccagttcatcttaagaatgtcaacgattagtcatgcaataaatgttctggttttaaaaaatacatatctggttttggtaaggtatttttaatcaattaggcttgtagtatcagtgaaatactgtaggtttagggactgggctagcttcatatcagatttacttgttaagtgactgttttggaatgtttacttttggactgggtttgtaacacggttaaaggcaatgagaaacaagcagaattccaggagtccttgaagcagagggcactggaagacaatatagca

SEQ ID NO: 90 - DNA, 564 bp, Homo sapien
atgcatgccgagcggcgcagtgtgatggatcgtggtcgcggccgaggtcgttgtgccgccgctgtggctctaaggcctaccaccttcagaagtcgacctgtggcaaatgtggctaccctgccaagcgcaagagaaagtataactggagtgccaaggctaaaagacgaaataccaccggaactggtcgaatgaggcacctaaaaattgtataccgcagattcaggcatggattccgtgaaggaacaacacctaaacccaagagggcagctgttgcagcatccagttcatcttaagaatgtcaacgattagtcatgcaataaatgttctggttttaaaaaatacatatctggttttggtaaggtatttttaatcaattaggcttgtagtatcagtgaaatactgtaggtttagggactgggctagcttcatatcagatttacttgttaagtgactgttttggaatgtttacttttggactgggtttgtaacacggttaaaggcaatgagaaacaagcagaattccaggagtccttgaagcagagggcactggaagacaatatagca

SEQ ID NO: 91 - DNA, 540 bp, Homo sapien
atgcatgccgagcggcgcagtgtgatggatcgtggtcgcggccgaggtaggcctaccaccttcagaagtcgacctgtggcaaatgtggctaccctgccaagcgcaagagaaagtataactggagtgccaaggctaaaagacgaaataccaccggaactggtcgaatgaggcacctaaaaattgtataccgcagattcaggcatggattccgtgaaggaacaacacctaaacccaagagggcagctgttgcagcatccagttcatcttaagaatgtcaacgattagtcatgcaataaatgttctggttttaaaaaatacatatctggttttggtaaggtatttttaatcaattaggcttgtagtatcagtgaaatactgtaggtttagggactgggctagcttcatatcagatttacttgttaagtgactgttttggaatgtttacttttggactgggtttgtaacacggttaaaggcaatgagaaacaagcagaattccaggagtccttgaagcagagggcactggaagacaatatagca

SEQ ID NO: 92 - DNA, 1103 bp, Homo sapien
gatgcatgctcgagcggcgcaggtgatggatgcgcccgggcaggtggccgagcaggaggcgccatcatgggagtggacatccgccataacaaggaccgaaaggttcggcgcaaggagcccaagagccaggatatctacctgaggctgttggtcaagttatacaggtttctggccagaagaaccaactccacattcaaccaggttgtgttgaagaggttgtttatgagtcgcaccaaccggccgcctctgtccctttcccggatgatccggaagatgaagcttcctggccgggaaaacaagacggccgtggttgtggggaccataactgatgatgtgcgggttcaggaggtacccaaactgaaggtatgtgcactgcgcgtgaccagccgggcccgcagccgcatcctcagggcagggggcaagatcctcactttcgaccagctggccctggactcccctaagggctgtggcactgtcctgctctccggtcctcgcaagggccgagaggtgtaccggcatttcggcaaggccccaggaaccccgcacagccacaccaagtgagtatcaggcccccagccctgccctctccccagactcagcctgcagggccaggcctggccacacttgggctgcttctcctatccctcgtaccagccagccccaggccttctggaactctcagctgcctcatcctgcctgcttttcccttcaacactgcttggagctgtgttttccagggcctgagcaggcatctcctggggagcatgcagttcaccggcctttgccagcccaggctgggaccctccaggtggtggggcaggtgcttccatagcccctcctggctccttggcttcccactctgccaagcttttccagcagcattgactctcctggggctgaatgtgacaggcttgtggtgttcctgtgccactccacaatggcctcctttaagagggcccccctctcactccctcctctccccacagaccctacgtccgctccaagggccggaagttcgagcgtgccagaggccgacgggccagccgaggctacaaaaactaaccctggatcctactctcttattaaaaagatttttgctgaca

SEQ ID NO: 93 - DNA, 398 bp, Homo sapien
gatgcatgctcgagcggcgcaggtgatggatgcgcccgggcaggtggccgagcaggaggcgccatcatgggagtggacatccgccataacaaggaccgaaaggttcggcgcaaggagcccaagagccaggatatctacctgaggctgttggtcaagttatacaggtttctggccagaagaaccaactccacattcaaccaggttgtgttgaagaggttgtttatgagtcgcaccaaccggccgcctctgtccctttcccggatgatccggaagatgaagcttcctggccgggaaaacaagacggccgtggttgtggggaccataactgatgatgtgcgggttcaggaggtacccaaactgatcggccgcgaccacgctaagccggattccagcacact

SEQ ID NO: 94 - DNA, 1673 bp, Homo sapien
gccagtgtgatggattggtcgcggcgaggtggccgagcaggaggcgccatcatgggagtggacatccgccataacaaggaccgaaaggttcggcgcaaggagcccaagagccaggatatctacctgaggctgttggtcaagttatacaggtttctggccagaagaaccaactccacattcaaccaggttgtgttgaagaggttgtttatgagtcgcaccaaccggccgcctctgtccctttcccggatggtgagtggctggtccagagagcacggtagacctgggagccgctgggtcttgtctgtctggaagggaggcaggacttggagctctgggagcaaccagggcatcaagggtttgtctcagccagtcgcgagcgtagagcttggactgttggttggaactgagtgtccatgggcagtgggcaagtctcctggtcctcctctccttctctttgtgaggtggaggtgtcctggtggcttcaggagattgccccaagtcataactgagttttatgtcaaaggctctgctgagggaggccctattgaacagtctgcatttttttttttatctggagctttccccagctggacctgaggagaggcctgtggggtttaaggggtgtggtgtgagtggggggtcccgttagagggcacagctgccctggcctggggatgcctcaagcggggctgaatgtaaacaccagaacaacttacgacgtacatcctccccaccctaagatccggaagatgaagcttcctggccgggaaaacaagacggccgtggttgtggggaccataactgatgatgtgcgggttcaggaggtacccaaactgaaggtgagctggcgggggctgggcagacccatcagacccttgctgtactgtgctgtgctgtgctgtgctgtgctgtgctgtgctggtccatcctcagtcttgccaccgctggtgaggcaagcatcctgcctgtctgagtggctttgaggattggtgtgggtcgtctctggcatggttgatggtggggtcccctgggcaagcttcttctggggcaagttgtaaactgttagtgctggcccctagagccagacagcctgggctcaagtctagactcctttgtcacctctgcacaggtctttttttggcccagcttccttgctgtagtttctagcataacaccagggatgtggtggtgaaagttccggaagtgttgagaactgctgctgtcagcccagggtgctccgggtagtaaacgatagtgttggttaccagggctctgctgcgccaaggcagtggagggtgagtcctggcagcccctgggtgaccacgcaggggtctgacccgccagccttgtcctctccaccaggtatgtgcactgcgcgtgaccagccgggcccgcagccgcatcctcagggcagggggcaagatcctcactttcgaccagctggccctggactcccctaagggctgtggcactgtcctgctctccggtcctcgcaagggccgagaggtgtaccggcatttcggcaaggccccaggaaccccgcacagccacaccaaaccctacgtccgctccaagggccggaagttcgagcgtgccagaggccgacgggccagccgaggctacaaaaactaaccctggatcctactctcttattaaaaagatttttgctgaca

SEQ ID NO: 95 - DNA, 1121 bp, Homo sapien
tgagtgcctggaccctgacctccaacgggagatccttcccggggccattccctaaatcgtgggcttgtttcttgctccctctggctattctgtgtccctgtggctgctccccaaccctaagggctgtccctgatctctcttgctatttccccaagcccgagactgctcccttacaaattctggctgctccctttccctgtgtccaataccgtgtgatcacctgtccctccctggtccctctaattctcccttgtgactattctgtaatcccactccccgttcctgagcccccgggattgtttcttggttccccagaatgttctccaagaacccaaagtgctgttccctaatcccactgacccttcctcagcacatctgcttgttgctctgcagctctgactattccagacaccagagggtgttacactgacctcctggctagtccaagcctgttccctgatggctcctgatggcctctgagcccagtgactatcttgaagccccactggctattcctgtgcttaaactccttagccgccaaccgggtggggccccttactactgccagtttttccctgtcctttgggacaattccacaggcgacctgcctgactgacccccagggcctattccccagccaccattccaggacactgatttactggcttactgttacctttcaggacccagtgacatttccctcaatgggaggggctgtcctggggtatgtacttaggtggggtgagagcaagtctccccagcggctcagtgttgaaagctgaggagaggaagttctgctccacgggggaggcagggagaagccctcagagatgtttccctcctcccttccaggtgtttccctgtttatccatcccctgcaaactgcagagtggcactcattgcttgtggacggaccagctcctccaaggctctgaaaagggcttccagtcccgtcaccttgcctgcctgcctcgggagccagggctgtgcacctggcagtccctgcggtcccagatagcctgaatcctgcccggagtggaagctgaagcctgcacagtgtccaccctgttcccactcccatctttcttccggacaatgaaataaagagttaccacccagca

SEQ ID NO: 96 - DNA, 570 bp, Homo sapien
ccagtccctggggcgcggcctagcaaccacgagggggcgaggctctgatgggaatggtcccactggaaatggggaccaccccaatttcagtctatcagaaggccgggcctttggcagcttggcagctcagccaatcacaagctgcttgtcggtccccgccccgcctttctccttaggaaaactgcaggatggactcttgcacatcactacctgcagttttgtggctccctggaacagcctgagcttagctcagcgccggggcttcaccaagacctacactgttggctgtgaggaatgcacagtgtttccctgtttatccatcccctgcaaactgcagagtggcactcattgcttgtggacggaccagctcctccaaggctctgaaaagggcttccagtcccgtcaccttgcctgcctgcctcgggagccagggctgtgcacctggcagtccctgcggtcccagatagcctgaatcctgcccggagtggaagctgaagcctgcacagtgtccaccctgttcccactcccatctttcttccggacaatgaaataaagagttaccacccagca

SEQ ID NO: 97 - DNA, 4990 bp, Homo sapien
gggagtcggcggcacaaaatggcggcggcggcggcggcggctggtgctgcagggtcggcagctcccgcggcagcggccggcgccccgggatctgggggcgcaccctcagggtcgcagggggtgctgatcggggacaggctgtactccggggtgctcatcaccttggagaactgcctcctgcctgacgacaagctccgtttcacgccgtccatgtcgagcggcctcgacaccgacacagagaccgacctccgcgtggtgggctgcgagctcatccaggcggccggtatcctgctccgcctgccgcaggtggccatggctaccgggcaggtgttgttccagcggttcttttataccaagtccttcgtgaagcactccatggagcatgtgtcaatggcctgtgtccacctggcttccaagatagaagaggccccaagacgcatacgggacgtcatcaatgtgtttcaccgccttcgacagctgagagacaaaaagaagcccgtgcctctactactggatcaagattatgttaatttaaagaaccaaattataaaggcggaaagacgagttctcaaagagttgggtttctgcgtccatgtgaagcatcctcataagataatcgttatgtaccttcaggtgttagagtgtgagcgtaaccaacacctggtccagacctcatgggtagcctctgagggtaagtgactaagacttctcctctgctgtccaagcgctttggtgcagggacagcggcatcttcagccaatccagtgcaggctctccaccgaaggctggctctagactggtggtacgcacatagcatagccatggccgactcctgctgtggttctctgacgattgtgcttcttgttaatcctctgtcgtgctttggtaatcgtattgattagagttggtaactgtcttgacttgaattttgtccctttaaaactgctgtacctgtatgataaagatgcagtacctttctcttaaaaaaaaatgctatggaaagctgtgagaattgaagagacaaattggctgtgtcagtgtggggttatgtcatgatttctagaagccctgaagttgctcttttgagcagctttgcatgacacgctctggtaaaaggtgtgcatctttaaattatttcatggatactttgaaaaatattgtatcacttcaaatacagcaataagtttatatgttctcaagatttcatttgtttttaagaattttaagttcgtggattaatatcactacttgaatactgacagttgttgattagacaccgaaaggttactgattgttgaatgtatctgtgttagagctgtgcactggcacgcttgcatcaggggctggggccacacggccgccacacagattcccccgtgatgcctggagctgcttccagagccgggtgtctccaagaggcacctgtaggacttcccatttagaaatctcttgagtgggtttgtatgttaccttctccaaggtttatttaggacagagatattgctggaaggtcatgggtcagattccctcacaacccacctcgtctgcgggtgcagccccactccaaggctccccgttattggggtatgtgaggagcagtaaatataaaaccagttcaactgtcctcatggaatcaccctttctgtttttgcagtattcataaagctagtgtaaggtctggttttagtctattaaatcttagagatctaaaggaaatgctcaaaatgtagccaggttttaaatgctttaacttttaaaaaatgtaaatttttgtatgtttatagcttctaaatatgaaagttaaagaatgtactgtgatgaaatgttcagtattatgttgcttctcagtatcatgttgcttctcagtattgtgttgcttctgattctatgaatgttcattttaagaccccttgttgaaatgggacagttggcagcggctctgatgagcccgagaagaggcctgcccttgggtgcggagtctccctccgcacgatgctcccacgcgtccaacttgcacccaaggggcttttccctcttccaagtggactccttcaaggaagctgcagctcggtcagcagagaaggggcctgccgccagcgccctggaggaagaggaagaggaacccaagaggatggcttgtctcccagcagccacaccggctttgtgctcagccagttcatttgagtttgcatgtttctctgcactatggattttgagcatttagatttctttaatcaaaagcgttttagtgactccagtagacattttctttctgaggcatcgtgctttgcatgagagcaggccaaggttgaggggaaaagtaaagttaaagtcggttctctttcatagcaacacgtattgtctgacattcagccagctttttttttttctaataatttctgtgcctttctgtcctgtatttactgtatttagaaaaagcagctagaatatttctccattaactcttgagattcacaggactgtctagctctgagtcctagcaatagactccttagaggagtagtacgtttatctagattttctctagataatgcaggcggaagacctgggttcccgggtggggcattgcagttcttcctgtgtttggcttccaggaattacatgaacgacagccttcgcaccgacgtcttcgtgcggttccagccagagagcatcgcctgtgcctgcatttatcttgctgcccggacgctggagatccctttgcccaatcgtccccattggtttcttttgtttggagcaactgaagaagaaattcaggaaatctgcttaaagatcttgcagctttatgctcggaaaaaggttgatctcacacacctggagggtgaagtggaaaaaagaaagcacgctatcgaagaggcaaaggcccaagcccggggcctgttgcctgggggcacacaggtgctggatggtacctcggggttctctcctgcccccaagctggtggaatcccccaaagaaggtaaagggagcaagccttccccactgtctgtgaagaacaccaagaggaggctggagggcgccaagaaagccaaggcggacagccccgtgaacggcttgccaaaggggcgagagagtcggagtcggagccggagccgtgagcagagctactcgaggtccccatcccgatcagcgtctcctaagaggaggaaaagtgacagcggctccacatctggtgggtccaagtcgcagcgctccctacaaaggctctgagattcggggctcccggaagtccaaggactgcaagtacccccagaagccacacaagtctcggagccggagttcttcccgttctcgaagcaggtcacgggagcgggcggataatccgggaaaatacaagaagaaaagtcattactacagagatcagcgacgagagcgctcgaggtcgtatgaacgcacaggccgtcgctatgagcgggaccaccctgggcacagcaggcatcggaggtgaggcggggttgcagtgactggtggccgcaagcccttccctggggagtacctgatggctgccctttgacccccggtggctgccctttgacccccgggtgtgctctcagcgcaagtggtcctagaacaggattctttttggaaatgtctgtcgactggaccttggtggatttggaaatggaactgagggaccggtgacacgtgcttcagaccggtctggggtgcggcgcacacctgggcccgtgcagggctcagctcggcagcagctctgagggcagctcaatgaaaaagtgaatgcacacgcccttgttggcgtggcctggcatggcctggtgctatcggcagccgctctccactccccgactgatactcaattacgtgaagccaagaaagatgatttttagaacctttgcctatattaggttgtacttatgtacatattttgcagtgtttcacaggagaaagtggccttaactgccccttattctctctccacgttgtaaataaacatgtgtttaatacaagttaaagctatgtatgaaaactcagaacttgaatcccgtcagcttaaaacttgtgtagggaatcctgacttttaaaatgtgagggtatttggatctgtgttgaaagtcgtatatttttatctgtgcggtgctgagtgcaggccaccagctcctaaatagaggttccctatatgcgcgtatgacatggtgaataaacacaactctctccactcaggacatccggagcgttatggacgtggtaggtggtcgttctgtgtgcttgtgaaagtgtccaggcgtgtgcacagccagtgcgcccacttccgggctccttgctccctgctgtactgaagttttggattttgcatccaatcctgtgtgcctgcccttctgccgaaggcttgtgaggggcctgagtcctctgcccatcaggatgacaggctccttcctgcagggccataggagggaagttttggaaacacagaatgattccaaggtgctctcgttcctgagggggactggtttgtaacccatgacatctgtgggcgagagaggcagctgggagcaggacacttggagggtcaccccacgggggtggcacctgcactctgagtgccccccactgtcatcagctgcctcttaccgtggacacagttttggttttggggactagggggccccactcctggtggtaccgtttggacttactagggcagtgggacatataggccggggctagtgggataacggggagttacgcctgatgacttttttgatggaatcctgcattagatagctggtgggacccccccctcagaattggggaactgaggagactccagggagggtgtccttccagggagagcagctatgaggggccccctagcttcctgtgcctggaagtaagagaaccagtaaagggccatacacacctgtacccaagagaccgctctccatttgctttctttttttactaaataattgtaaaatattattatgacataaagaaccatttaaggcca

SEQ ID NO: 98 - DNA, 4944 bp, Homo sapien
gggagtcggcggcacaaaatggcggcggcggcggcggcggctggtgctgcagggtcggcagctcccgcggcagcggccggcgccccgggatctgggggcgcaccctcagggtcgcagggggtgctgatcggggacaggctgtactccggggtgctcatcaccttggagaactgcctcctgcctgacgacaagctccgtttcacgccgtccatgtcgagcggcctcgacaccgacacagagaccgacctccgcgtggtgggctgcgagctcatccaggcggccggtatcctgctccgcctgccgcaggtggccatggctaccgggcaggtgttgttccagcggttcttttataccaagtccttcgtgaagcactccatggagcatgtgtcaatggcctgtgtccacctggcttccaagatagaagaggccccaagacgcatacgggacgtcatcaatgtgtttcaccgccttcgacagctgagagacaaaaagaagcccgtgcctctactactggatcaagattatgttaatttaaagaaccaaattataaaggcggaaagacgagttctcaaagagttgggtttctgcgtccatgtgaagcatcctcataagataatcgttatgtaccttcaggtgttagagtgtgagcgtaaccaacacctggtccagacctcatgggtagcctctgagggtaagtgactaagacttctcctctgctgtccaagcgctttggtgcagggacagcggcatcttcagccaatccagtgcaggctctccaccgaaggctggctctagactggtggtacgcacatagcatagccatggccgactcctgctgtggttctctgacgattgtgcttcttgttaatcctctgtcgtgctttggtaatcgtattgattagagttggtaactgtcttgacttgaattttgtccctttaaaactgctgtacctgtatgataaagatgcagtacctttctcttaaaaaaaaatgctatggaaagctgtgagaattgaagagacaaattggctgtgtcagtgtggggttatgtcatgatttctagaagccctgaagttgctcttttgagcagctttgcatgacacgctctggtaaaaggtgtgcatctttaaattatttcatggatactttgaaaaatattgtatcacttcaaatacagcaataagtttatatgttctcaagatttcatttgtttttaagaattttaagttcgtggattaatatcactacttgaatactgacagttgttgattagacaccgaaaggttactgattgttgaatgtatctgtgttagagctgtgcactggcacgcttgcatcaggggctggggccacacggccgccacacagattcccccgtgatgcctggagctgcttccagagccgggtgtctccaagaggcacctgtaggacttcccatttagaaatctcttgagtgggtttgtatgttaccttctccaaggtttatttaggacagagatattgctggaaggtcatgggtcagattccctcacaacccacctcgtctgcgggtgcagccccactccaaggctccccgttattggggtatgtgaggagcagtaaatataaaaccagttcaactgtcctcatggaatcaccctttctgtttttgcagtattcataaagctagtgtaaggtctggttttagtctattaaatcttagagatctaaaggaaatgctcaaaatgtagccaggttttaaatgctttaacttttaaaaaatgtaaatttttgtatgtttatagcttctaaatatgaaagttaaagaatgtactgtgatgaaatgttcagtattatgttgcttctcagtatcatgttgcttctcagtattgtgttgcttctgattctatgaatgttcattttaagaccccttgttgaaatgggacagttggcagcggctctgatgagcccgagaagaggcctgcccttgggtgcggagtctccctccgcacgatgctcccacgcgtccaacttgcacccaaggggcttttccctcttccaagtggactccttcaaggaagctgcagctcggtcagcagagaaggggcctgccgccagcgccctggaggaagaggaagaggaacccaagaggatggcttgtctcccagcagccacaccggctttgtgctcagccagttcatttgagtttgcatgtttctctgcactatggattttgagcatttagatttctttaatcaaaagcgttttagtgactccagtagacattttctttctgaggcatcgtgctttgcatgagagcaggccaaggttgaggggaaaagtaaagttaaagtcggttctctttcatagcaacacgtattgtctgacattcagccagctttttttttttctaataatttctgtgcctttctgtcctgtatttactgtatttagaaaaagcagctagaatatttctccattaactcttgagattcacaggactgtctagctctgagtcctagcaatagactccttagaggagtagtacgtttatctagattttctctagataatgcaggcggaagacctgggttcccgggtggggcattgcagttcttcctgtgtttggcttccaggaattacatgaacgacagccttcgcaccgacgtcttcgtgcggttccagccagagagcatcgcctgtgcctgcatttatcttgctgcccggacgctggagatccctttgcccaatcgtccccattggtttcttttgtttggagcaactgaagaagaaattcaggaaatctgcttaaagatcttgcagctttatgctcggaaaaaggttgatctcacacacctggagggtgaagtggaaaaaagaaagcacgctatcgaagaggcaaaggcccaagcccggggcctgttgcctgggggcacacaggtgctggatggtacctcggggttctctcctgcccccaagctggtggaatcccccaaagaaggtaaagggagcaagccttccccactgtctgtgaagaacaccaagaggaggctggagggcgccaagaaagccaaggcggacagccccgtgaacggcttgccaaaggggcgagagagtcggagtcggagccggagccgtgagcagagctactcgaggtccccatcccgatcagcgtctcctaagaggaggaaaagtgacagcggctccacatctggtgggtccaagtcgcagagccgctcccggagcaggagtgactccccaccgagacaggccccccgcagcgctccctacaaaggctctgagattcggggctcccggaagtccaaggactgcaagtacccccagaagccacacaagtctcggagccggagttcttcccgttctcgaagcaggtcacgggagcgggcggataatccgggaaaatacaagaagaaaagtcattactacagagatcagcgacgagagcgctcgaggtcgtatgaacgcacaggccgtcgctatgagcgggaccacccggtggctgccctttgacccccgggtgtgctctcagcgcaagtggtcctagaacaggattctttttggaaatgtctgtcgactggaccttggtggatttggaaatggaactgagggaccggtgacacgtgcttcagaccggtctggggtgcggcgcacacctgggcccgtgcagggctcagctcggcagcagctctgagggcagctcaatgaaaaagtgaatgcacacgcccttgttggcgtggcctggcatggcctggtgctatcggcagccgctctccactccccgactgatactcaattacgtgaagccaagaaagatgatttttagaacctttgcctatattaggttgtacttatgtacatattttgcagtgtttcacaggagaaagtggccttaactgccccttattctctctccacgttgtaaataaacatgtgtttaatacaagttaaagctatgtatgaaaactcagaacttgaatcccgtcagcttaaaacttgtgtagggaatcctgacttttaaaatgtgagggtatttggatctgtgttgaaagtcgtatatttttatctgtgcggtgctgagtgcaggccaccagctcctaaatagaggttccctatatgcgcgtatgacatggtgaataaacacaactctctccactcaggacatccggagcgttatggacgtggtaggtggtcgttctgtgtgcttgtgaaagtgtccaggcgtgtgcacagccagtgcgcccacttccgggctccttgctccctgctgtactgaagttttggattttgcatccaatcctgtgtgcctgcccttctgccgaaggcttgtgaggggcctgagtcctctgcccatcaggatgacaggctccttcctgcagggccataggagggaagttttggaaacacagaatgattccaaggtgctctcgttcctgagggggactggtttgtaacccatgacatctgtgggcgagagaggcagctgggagcaggacacttggagggtcaccccacgggggtggcacctgcactctgagtgccccccactgtcatcagctgcctcttaccgtggacacagttttggttttggggactagggggccccactcctggtggtaccgtttggacttactagggcagtgggacatataggccggggctagtgggataacggggagttacgcctgatgacttttttgatggaatcctgcattagatagctggtgggacccccccctcagaattggggaactgaggagactccagggagggtgtccttccagggagagcagctatgaggggccccctagcttcctgtgcctggaagtaagagaaccagtaaagggccatacacacctgtacccaagagaccgctctccatttgctttctttttttactaaataattgtaaaatattattatgacataaagaaccatttaaggcca

SEQ ID NO: 99 - DNA, 438 bp, Homo sapien
gcctactactactaaattcgcggccgcgtcgaccttcttgaactggtgctgtctgggcttcatagcattcgcctactccgtgaagtctagggacaggaagatggttggcgacgtgaccggggcccaggcctatgcctccaccgccaagtgcctgaacatctgggccctgattttgggcatcttcatgaccggattcatcctgttactggtattcggctctgtgacagtctaccatattatgttacagataatacaggaaaaacggggttactagtagccgcccatagcctgcaacctttgcactccactgtgcaatgctggccctgcacgctggggctgttgcccctgcccccttggtcctgcccctagatacagcagtttatacccacacacctgtctacagtgtcattcaataaagtgcacgtgcttgtgaaaaar

SEQ ID NO: 100 - DNA, 450 bp, Homo sapien
agattaatatatagggcaattggtcatctaatcatgctcgagcggcgcagtgtgatggatyggycgccggscgaggtacgtgaaaccaaaattaagggtaaaagtgggagattcttcacagtcaagctcccagttgctcttgatcctggggccaagatttcagtcattgtggaaacagtctacacccatgtgcttcatccatatccaacccagatcacccagtcagagaaacagtttgtggtgtttgaggggaaccattatttctactctccctatccaacgaagacacaaaccatgcgtgtgaagcttgcctctcgaaatgtggagagctacaccaagctggggaaccccacgcgctctgaggacctactggattatgggcctttcagagatgtgcctgcctatagtcaggatacttttaaagtacctcggccgcgaccacgctaagcc

SEQ ID NO: 101 - DNA, 1965 bp, Homo sapien
agcggaatgaacggctgctcagtggcgggagggcgggctaccgcgcccgggccctacccgccctggcgcactgctcttcccggtcatggaggcgccagccgccggcttgtttctgctcctgttgcttgggacttgggccccggcgccgggcagcgcctcctccgaggcaccgccgctgatcaatgaggacgtgaagcgcacagtggacctaagcagccacctggctaaggtgacggccgaggtggtcctggcgcacctgggcggcggctccacgtcccgagctacctctttcctgctggctttggagcctgagctcgaggcccggctggcgcacctgggcgtgcaggtaaagggagaagatgaggaagagaacaatttggaagtacgtgaaaccaaaattaagggtaaaagtgggagattcttcacagtcaagctcccagttgctcttgatcctggggccaagatttcagtcattgtggaaacagtctacacccatgtgcttcatccatatccaacccagatcacccagtcagagaaacagtttgtggtgtttgaggggaaccattatttctactctccctatccaacgaagacacaaaccatgcgtgtgaagcttgcctctcgaaatgtggagagctacaccaagctggggaaccccacgcgctctgaggacctactggattatgggcctttcagagatgtgcctgcctatagtcaggatacttttaaagtacattatgagaacaacagccctttcctgaccatcaccagcatgacccgagtcattgaagtctctcactggggtaatattgctgtggaagaaaatgtggacttaaagcacacaggagctgtgcttaaggggcctttctcacgctatgattaccagagacagccagatagtggaatatcctccatccgttcttttaagaccatccttcctgctgctgcccaggatgtttattaccgggatgagattggcaatgtttctaccagccacctccttattttggatgactctgtagagatggaaatccggcctcgcttccctctctttggcgggtggaagacccattacatcgttggctacaacctcccaagctatgagtacctctataatttgggtgaccagtatgcactgaagatgaggtttgtggaccatgtgtttgatgaacaagtgatagattctctgactgtgaagatcatcctgcctgaaggagccaagaacattgaaattgatagtccctatgaaatcagccgtgccccagatgagctgcactacacctatctggacacatttggccgccctgtgattgttgcctacaagaaaaatctggtagaacagcacattcaggacattgtgctggatgcacaggtcaaggagctggtgctgaagtcggcggtggaggctgagcgcctggtggctggcaagctcaagaaagacacgtacattgagaatgagaagctcatctcaggaaagcgccaggagctggtcaccaagatcgaccacatcctggatgccctgtagcccctgcccgcatcctccagggggcccagggtgcctgcactttgctgtggcaggcagattgggtggtagtgggaggttgtgcatggaggccagtgaaagctgacatctgtaaaaggccttcaaggaagagaaaccaggccctgcgtcaggcagtgtgagtttgccgtttgtccttaactttctttttttttttttttaaaaaaagaaaactttaaaaaaactcccattaaaaacaaaacatctttgtgttttgaacaaaggaattttcaatatttgattggtattctgttctgaagtctaggatatttttcagcctataaagccccctgttttatgcccttctaattctgatgtttgggtattgtgtgagtgcatgtgttttttttttttttttttaaagcgtgtgtgaacaaatggaaataaagcagggactgtgaaca

SEQ ID NO: 102 - DNA, 1193 bp, Homo sapien
agcggaatgaacggctgctcagtggcgggagggcgggctaccgcgcccgggccctacccgccctggcgcactgctcttcccggtcatggaggcgccagccgccggcttgtttctgctcctgttgcttgggacttgggccccggcgccgggcagcgcctcctccgaggcaccgccgctgatcaatgaggacgtgaagcgcacagtggacctaagcagccacctggctaaggtgacggccgaggtggtcctggcgcacctgggcggcggctccacgtcccgagctacctctttcctgctggctttggagcctgagctcgaggcccggctggcgcacctgggcgtgcaggtaaagggagaagatgaggaagagaacaatttggaagtacgtgaaaccaaaattaagggtaaaagtgggagattcttcacagtcaagctcccagttgctcttgatcctggggccaagatttcagtcattgtggaaacagtctacacccatgtgcttcatccatatccaacccagatcacccagtcagagaaacagtttgtggtgtttgaggggaaccattatttctactctccctatccaacgaagacacaaaccatgcgtgtgaagcttgcctctcgaaatgtggagagctacaccaagctggggaaccccacgcgctctgaggacctactggattatgggcctttcagagatgtgcctgcctatagtcaggatacttttaaagtacattatgagaacaacagccctttcctgaccatcaccagcatgacccgagtcattgaagtctctcactggggtaatattgctgtggaagaaaatgtggacttaaagcacacaggagctgtgcttaaggggcctttctcacgctatgattaccagagacagccagatagtggaatatcctccatccgttcttttaagaccatccttcctgctgctgcccaggatgtttattaccgggatgagattggcaatgtttctaccagccacctccttattttggatgactctgtagagatggaaatccggcctcgcttccctctctttggcgggtggaagacccattacatcgttggctacaacctcccaagctatgagtacctctataatttgggtcagtcttcaatagtaagggagaaactaaccttttctttaatttcgtgaattttttttctttcaattatca

SEQ ID NO: 103 - DNA, 1685 bp, Homo sapien
agcggaatgaacggctgctcagtggcgggagggcgggctaccgcgcccgggccctacccgccctggcgcactgctcttcccggtcatggaggcgccagccgccggcttgtttctgctcctgttgcttgggacttgggccccggcgccgggcagcgcctcctccgaggcaccgccgctgatcaatgaggacgtgaagcgcacagtggacctaagcagccacctggctaaggtgacggccgaggtggtcctggcgcacctgggcggcggctccacgtcccgagctacctctttcctgctggctttggagcctgagctcgaggcccggctggcgcacctgggcgtgcaggtaaagggagaagatgaggaagagaacaatttggaagtacgtgaaaccaaaattaagggtaaaagtgggagattcttcacagtcaagctcccagttgctcttgatcctggggccaagatttcagtcattgtggaaacagtctacacccatgtgcttcatccatatccaacccagatcacccagtcagagaaacagtttgtggtgtttgaggggaaccattatttctactctccctatccaacgaagacacaaaccatgcgtgtgaagcttgcctctcgaaatgtggagagctacaccaagctggggaaccccacgcgctctgaggacctactggattatgggcctttcagagatgtgcctgcctatagtcaggatacttttaaagtacattatgagaacaacagccctttcctgaccatcaccagcatgacccgagtcattgaagtctctcactggggtaatattgctgtggaagaaaatgtggacttaaagcacacaggagctgtgcttaaggggcctttctcacgctatgattaccagagacagccagatagtggaatatcctccatccgttcttttaagaccatccttcctgctgctgcccaggatgtttattaccgggatgagattggcaatgtttctaccagccacctccttattttggatgactctgtagagatggaaatccggcctcgcttccctctctttggcgggtggaagacccattacatcgttggctacaacctcccaagctatgagtacctctataatttgggtgaccagtatgcactgaagatgaggtttgtggaccatgtgtttgatgaacaagtgatagattctctgactgtgaagatcatcctgcctgaaggagccaagaccacatcctggatgccctgtagcccctgcccgcatcctccagggggcccagggtgcctgcactttgctgtggcaggcagattgggtggtagtgggaggttgtgcatggaggccagtgaaagctgacatctgtaaaaggccttcaaggaagagaaaccaggccctgcgtcaggcagtgtgagtttgccgtttgtccttaactttctttttttttttttttaaaaaaagaaaactttaaaaaaactcccattaaaaacaaaacatctttgtgttttgaacaaaggaattttcaatatttgattggtattctgttctgaagtctaggatatttttcagcctataaagccccctgttttatgcccttctaattctgatgtttgggtattgtgtgagtgcatgtgttttttttttttttttttaaagcgtgtgtgaacaaatggaaataaagcagggactgtgaaca

SEQ ID NO: 104 - DNA, 1182 bp, Homo sapien
gggttgcgccagggagccggaaagccgactcccgaagttggggtcctgggaaaacttgggtcctgggttgactgagaagcggcggggaaaggaggcgggccaggaggagggggcctggcggacgccggccggggggcggggcgcggcggggctgtcggtcacgcccctcagtccgccccgccccgccccgcctgccggggaagggccacgttgcccgcccggccgtccggccccggcgcgccgcagaaagggctggcgagtcgaaaggcgaggcggccgcggcagcgcttgggacgcgcctgggcaccgggctcgctccctgcgccccggagcaggccaagttcggggccaggacgtcgggaggacctggtgcatggctgcctcctaatcccatagtccagaggaggcatccctaggactgcgggcaagggagccgggcaagcccagggcagccttgaaccgtcccctggcctgccctccccggtgggggccaggatgctgaagaagcagtctgcagggcttgtgctgtggggcgctatcctctttgtggcctgatactaaccaaaggggcttccttgtcagggcctggtggagttggtgggtcatcggggctcactgcctcctgcccttctctcctgtctgacccccacttagcccttctctccttgcagcctagcagtttatagttctgagatggaaagttgaagggggcaagcaagacctctcctcagcccatgcccagctgtcaggagagaggtgcagggaggaaggccttgtgctgggacaacctctctcttgccttacctcagagagggactatgccctgacccctcctttctgaaaatcagtgccctccctgttgctctaggaggctcctgctggcttggtagaagacagaattcgatctgcctgtccctttttcccctggggtttgacacacaggctcctctcagcatgaggtggagcagtgaccaggtggagcagtgaccaggacgcctctggcccagtgctgcccagcctccccgcccgctcccaggcgccccatgtcctcacaggccaggacgccatggcaggatggagaggacttggtggatttttgtttcttgcctgacctcagtttcatgaaagaaagtggaagctacagaattattttctaaaataaaggctgaattgtctgaaaaa

SEQ ID NO: 105 - DNA, 2645 bp, Homo sapien
agcgggcgcgctccgctcggcagcctgtgggacgcgaccgcggcgctagtctcgttcctttgtgctgcggcggcggcttctcgagtcctccccgacgcgtcctctaggccagcgagccccgcgctctccggtgacggaccatgtcggcggcgggagcgggcgcgggcgtagaggcgggcttctccagcgaggagctgctctcgctccgtttcccgctgcaccgcgcctgccgcgacggggacctggccacgctctgctcgctgctgcagcagacaccccacgcccacctggcctctgaggactccttctatggctggacgcccgtgcactgggccgcgcatttcggcaagttggagtgcttagtgcagttggtgagagcgggagccacactcaacgtctccaccacacggtacgcgcagacgccagcccacattgcagcctttgggggacatcctcagtgcctggtctggctgattcaagcaggagccaacattaacaaaccggattgtgagggtgaaactcccattcacaaggcagctcgctctgggagcctagaatgcatcagtgcccttgtggcgaatggggctcacgtcgacctgagaaatgccagtggcctgacagcagcagacattgcacaaacccagggtttccaagagtgtgcccagtttctcttgaacctccagaattgtcatctgaaccatttctataacaatggcatcttaaatgggggtcatcagaatgtatttcctaatcatattagtgtgggaacaaatcgaaagagatgcttggaagactcagaagactttggagtaaagaaagctagaactgaagctcaaagcttggattctgccgtgccactcacgaatggcgacacagaagacgatgctgacaaaatgcacgttgatagggagtttgctgttgtaacaggtgggagtggacagtttcctgttagctgcaacaacaatccaatggttgaagacaccaaacagcaggagagtggttctgttggaccaaaagaaatagaaatatatactgtgtcagcaatgcagaccccctgtcgttgcaggaatcaatatgaaaaacagtagctccgtatcgaatacattgacaaatggatgtgtcatcaatggacatttggacttcccctccacgaccccgctcagtgggatggaaagcaggaatggccagtgcttgacaggaactaacggaattagcagtggattagccccaggacagccgtttccgagtagccagggttctctctgcattagtgggactgaggagccagagaagaccctgagagctaaccctgagttgtgcggttctctgcacctgaacgggagtccaagtagctgcatagccagtaggccttcctgggtggaagacattggggataacctgtactatggacactaccacgggtttggggacactgctgaaagcatcccagaactgaacagtgtggtcgagcattccaagtccgtgaaggtgcaggagcggtacgacagtgccgtgctgggcaccatgcacctgcaccacggctcctagagacgctgacctggctctcggaaacgcaggagtccttcctggtagccagctcagaatacccatgtagcagcaacttgaacgaatgtcacaacttgtactttttttatatacttcaactttctgaaaaagtaaacttcgacaagttcccagcaactgcttgtttgtgcatgagtagggcttactaagtgcatagatgtttctacagtgaggtgtcctttttataaggtgcacttttggagtttttctgatgccaatctcaacattgtctttttaatactgtcaccagatattgccatttttctttttgttaaaagattatatgatcaagataaattggggtggtaaatcaggtgcctggtaatttatctctttgcacatgggcatcattttaaaaagcttgcttccactcttttctgtagaatttgacggaacacagctatttccctatgcaaggtacagccttacaaagatttctgcagtgatttgtgtgaagaagagaatgtttgtctttttcaatgaagctttgcagatcaccatgtggttgaaggttttagttgtggacacagtggtccctccttaatgatgaagatcactgccttgggcttcatggaaaacaggcccagcctggggctgcgtttggatttattgtttttattccacacttcctacttggtctctggaagttttaccacatgtaacagattcctttatatgtagtgaaaatcactatttgtagaaactgtcaggtcaaaatatttaactgactgttgacatgtattttcttttttccttgtttttgttttttggggttttctgctttaagatatataccactatgtatatccagttaactgagagaattttgactctcttaataaaactgcattaagtttttgattttgtagaaattagcttttgtctaggcaactagtggttatactctgcaaatattgtaatgaatttttacttttttgatttttgtaataaaaattggtgcagataaaatgtcaaatgaacaaaccagtgttctaagagtgttactaacattttgttctaaaactgtccttcacaaattgaataaaaaactctcacactca

SEQ ID NO: 106 - DNA, 2439 bp, Homo sapien
gcgcgcgcatgttagggtaatccatttttctgtttgtttctgaattgctttggagaaggcaactcagactccaaggaatacaacagctgccgtgtgaagcttttctcacttttccagtggtcgtagcaggaacagcgtcttgacctcacatcagtgacgtgaaaagagctgagtttgaagtgcatattggtcctccataaagaatgtgtgtatgtgctgtttttttaattaagtctggtaatttatttgatacatgtattgtagttttagttgaattaaactagttagtaaaactgttggtgaggtagtgtttcagttactctgtagataagctcttttgttaaaacctcttaagttttttgttcctgaatatgttacaaacatctattttctcttactgtagctatcacatgaggaaaaaaacttgaaaaaaagacttcatagtgtgtgtttatgtttgattttagaagacccttttgaggacttctttgggaatcgaaggggtccccgaggaagcagaagccgagggacggggtcgtttttctctgcgttcagtggatttccgtcttttggaagtggattttcttcttttgatacaggatttacttcatttgggtcactaggtcacgggggcctcacttcattctcttccacgtcatttggtggtagtggcatgggcaacttcaaatcgatatcaacttcaactaaaatggttaatggcagaaaaatcactacaaagagaattgtcgagaacggtcaagaaagagtagaagttgaagaagatggccagttaaagtccttaacaataaatggtgtggccgacgacgatgccctcgctgaggagcgcatgcggagaggccagaacgccctgccagcccagcctgccggcctccgcccgccgaagccgccccggcctgcctcgctgctgagacacgcgcctcactgtctctctgaggaggagggcgagcaggaccgacctcgggcacccgggccctgggaccccctcgcgtccgcagcaggattgaaagaaggtggcaagaggaagaagcagaagcagagagaggagtcgaagaagaagaagtcgaccaaaggcaatcactagaccggacttgaggcacgcggtgcacccccagacgctggcgctccaccgtgctcggcatgcggtcgtgcacacgcgctaggtagcagcgtcggtcaggactgtctcgaggccacactcgctcggcaggattatgcgatcacggatcagtcagagcagggtcaggagacggggctgacggcacgggtggcggggacagacgtttgggacttggccgcgactctctgcttctctccagctctcaatctgctgcattttcctctagtgcttccggatcctcttcattcttttcggctactcaaccactccgcatgctgctggaatatttctggctttagaagtacaggagggcgcagatggctaactgagtaacattcatgaaatgaggctttctgtggcggcgtagtgtttggaattagaaggtaattcagtagagtgtaacttagagaatattgcaagtgacacattgaatcctgcccgtcagggcaccttttcctcagagcaatccggccacacgaatagaaggctgtcgtgaatcacatcagatgtaaaatcattccttctgtttactcttttaattttcatcctttgcaggtagtgcaaattcaacttcaaatatggtgtaggttttgctagattccatatttttttcttggatttttgctaattatttttagcaaaaaatttttgctcagtggcaccctccctagtgtccatgggttagggccatgctggggaaaacgggccggtatttacacacgcgcaaaacacccagagacggcacaaggaggttgaactcatgtttcagttcgcgaacattgactccttacgaaagtcacttcattctaactagatgcgcccacttccggtcattatttcgtttgcatgatgtattgcttcttcacgttttgtttttattgagcacggagtagaattccagggctgccttgacttcttccctgcatgctccctcccagtgactttccttccctttcacatgaggatctgccgttcatgttgctttctcctttgtcctcttggacttgagggcattgtgaaaagctttgctgtgatttaaaaatgccagcaattttaatctagcagtgttgaagctgggaattttttggcgcaatccatgtagcagtgacccaggcttgggagccagaaacaagtgtgacctgggattttatttaacacaactgttgccaaagagttggctttgtttatttggttttggcggggagaggagtggtatttgatgctttctgtggacaatgtaaccctaaacacatcatgtattttaaatgccacctacataaataaaacataagcatattgaa

SEQ ID NO: 107 - DNA, 1958 bp, Homo sapien
ggcagggcctcaggcccccaagagggctgtgagcaggcaccttcctgtgaggcacgatgccaccatgtgaagttgtgtgggtctttggagagttctggcaggttgagggcctgtgcgtgtgggacccaggcctgccctgcctgctgccggccatgttccctctgcccagtcatgttgacaattgtggccaaattcaacatcgggcctgtttcctgcacccacgttggcacacactgagttcaagacagtttctgcagaaatgaatccagaggtgtttatttctggcacgttggatcagacgttcagagggtgggcgtctttctccatgcacttcagctggatcagtcagtgtcagccattgactttagcaacagggaaatgaaagactttcctcaataagaaatgggactttctcacgctggatggcacagagctggcaaacatgaggccagtccacaccaaggctttgcctgcagaaaggctgcactgtggccagcgggggaagcggaggagacacctgtggacaccctccccacaggattgaaagaaggtggcaagaggaagaagcagaagcagagagaggagtcgaagaagaagaagtcgaccaaaggcaatcactagaccggacttgaggcacgcggtgcacccccagacgctggcgctccaccgtgctcggcatgcggtcgtgcacacgcgctaggtagcagcgtcggtcaggactgtctcgaggccacactcgctcggcaggattatgcgatcacggatcagtcagagcagggtcaggagacggggctgacggcacgggtggcggggacagacgtttgggacttggccgcgactctctgcttctctccagctctcaatctgctgcattttcctctagtgcttccggatcctcttcattcttttcggctactcaaccactccgcatgctgctggaatatttctggctttagaagtacaggagggcgcagatggctaactgagtaacattcatgaaatgaggctttctgtggcggcgtagtgtttggaattagaaggtaattcagtagagtgtaacttagagaatattgcaagtgacacattgaatcctgcccgtcagggcaccttttcctcagagcaatccggccacacgaatagaaggctgtcgtgaatcacatcagatgtaaaatcattccttctgtttactcttttaattttcatcctttgcaggtagtgcaaattcaacttcaaatatggtgtaggttttgctagattccatatttttttcttggatttttgctaattatttttagcaaaaaatttttgctcagtggcaccctccctagtgtccatgggttagggccatgctggggaaaacgggccggtatttacacacgcgcaaaacacccagagacggcacaaggaggttgaactcatgtttcagttcgcgaacattgactccttacgaaagtcacttcattctaactagatgcgcccacttccggtcattatttcgtttgcatgatgtattgcttcttcacgttttgtttttattgagcacggagtagaattccagggctgccttgacttcttccctgcatgctccctcccagtgactttccttccctttcacatgaggatctgccgttcatgttgctttctcctttgtcctcttggacttgagggcattgtgaaaagctttgctgtgatttaaaaatgccagcaattttaatctagcagtgttgaagctgggaattttttggcgcaatccatgtagcagtgacccaggcttgggagccagaaacaagtgtgacctgggattttatttaacacaactgttgccaaagagttggctttgtttatttggttttggcggggagaggagtggtatttgatgctttctgtggacaatgtaaccctaaacacatcatgtattttaaatgccacctacataaataaaacataagcatattgaa

SEQ ID NO: 108 - DNA, 3400 bp, Homo sapien
ccgccccgtcgcgccagcgtgcggagaaacctggcgccgcgaccagtgtatcgggggtcttggaaatggctaagaaagctggcctctgcctaggaggctctcggcaggggggctgccaatccgggatggttaccggaaatgaaccgcgcgatctggccctttcacacccacttagctttgtagggggtttgtagtctttacaggacaaaagggcacctattccagagcacacccccttttcttcctctcccttctgtgcctcactgctttccgatctcatagttgctcccagtaagtgctccaaagtcgtgtggggccgcatctgaggtctgcccgcctgaattgggttggaggggttcatgttctgagaaggcgaaggccagggtgtaggatggtgccccgtgactttccagtctttgtaggcgtgcctggtatcttcatcgtaatagcagagtcgtcaactttctatgaaaggtggttttaccttgataggtggtagtggtggcctaatttgtatcattgtcatgggtttagtttccatattctagttagcagctgctactgttctcttgcaagtgtataatgtgaaataataaacgtgaagacttctgaataaggttattctgtgtctttcatagtagaaaccttaatgatcggtctgttgtagtgaaactctttaaaaaggcgctatagaaaaccaatttctgagtaaaccagcagacagcatgacttgtaaatggtcttttaattaattaaaaagaaattagtcagctacaagcatgaacatgtggaacgcttacctttgtactaggcgtttttgtttttgttttaatggcttttggaatattatagtattaacatctggaaaactaggtaaatttatcttagaattaagttttttgctccttttttgcagaaaaagaacagcaagaagcgattgaacacattgatgaagtacaaaatgaaatagacagacttaatgaacaagccagtgaggagattttgaaagtagaacagaaatataacaaactccgccaaccattttttcagaagaggtcagaattgatcgccaaaatcccaaatttttgggtaacaacatttgtcaaccatccacaagtgtctgcactgcttggggaggaagatgaagaggcactgcattatttgaccagagttgaagtgacagaatttgaagatattaaatcaggttacagaatagatttttattttgatgaaaatccttactttgaaaataaagttctctccaaagaatttcatctgaatgagagtggtgatccatcttcgaagtccaccgaaatcaaatggaaatctggaaaggatttgacgaaacgttcgagtcaaacgcagaataaagccagcaggaagaggcagcatgaggaaccagagagcttctttacctggtttactgaccattctgatgcaggtgctgatgagttaggagaggtcatcaaagatgatatttggccaaacccattacagtactacttggttcccgatatggatgatgaagaaggagaaggagaagaagatgatgatgatgatgaagaggaggaaggattagaagatattgacgaagaaggggatgaggatgaaggtgaagaagatgaagatgatgatgaaggggaggaaggagaggaggatgaaggagaagatgactaaatagaacactgatggattccaaccttcctttttttaaattttctccagtccctgggagcaagttgcagtctttttttttttttttttttttttccctcttgtgctcagtcgccctgttcttgaggtctcttttctctactccatggttctcaatttatttggggggaaataccttgagcagaatacaatgggaaaagagtctctacccctttctgttcgaagttcatttttatcccttcctgtctgaacaaaaactgtatggaatcaacaccaccgagctctgtgggaaaaaagaaaaacctgctcccttcgctctgctggaagctggagggtgctaggcccctgtgtagtagtgcatagaattctagcttttttcctcctttctctgtatattgggctcagagagtacactgtgtctctatgtgaatatggacagttagcatttaccaacatgtatctgtctactttctcttgtttaaaaaaagaaaaaaaaacttaaaaaaatggggttatagaaggtcagcaaagggtgggtttgagatgtttgggtgggttaagtgggcattttgacaacatggcttctcctttggcatgtttaattgtgatatttgacagacatccttgcagtttaagatgacacttttaaaataaattctctcctaatgatgacttgagccctgccactcaatgggagaatcagcagaacctgtaggatcttatttggaattgacattctctattgtaattttgttcctgtttatttttaaattttctttttgtttcactggaaaggaaagatgatgctcagttttaaacgttaaaagtgtacaagttgctttgttacaataaaactaaatgtgtacacaaaggatttgatgcttttctctcagcataggtatgcttactatgaccttccaagtttgacttgtataacatcactgtcaaactttgtcaccctaacttcgtattttttgatacgcactttgcaggatgacctcagggctatgtggattgagtaatgggatttgaatcaatgtattaatatctccatagctgggaaacgtgggttcaatttgccattggtttctgaaagtattcacatcatttgggataccagatagctcaatactctctgagtacattgtgcccttgatttttatctccaagtggcagtttttaaaattggccttttacctggatataaattaattgtgcctgccaccaccatccaacagacctggtgctctaatgccaagttatacacgggacagttgctggcatgtcttcattggctatataaaatgtggccaagaagataggctctcagtaagaagtctgatggtgagcagtaactgtccctgctttctggtataaagctctcaaatgtgaccatgtgaatctgggtgggataatggactcagctctgtctgctcaatgccattgtgcagagaagcaccctaatgcataagctttttaatgctgtaaaatatagtcgctgaaattaaatgccactttttcagaggtgaattaatggacagtctggtgaacttcaaaagctttttgatgtataaaacttgataaatggaactattccatcaataggcaaaagtgtaacaacctatctagatggatagtatgtaatttctgcacaggtctctgtttagtaaatacatcactgtataccgatcaggaatcttgctccaataaaggaacataaagattt

SEQ ID NO: 109 - DNA, 2775 bp, Homo sapien
ccgccccgtcgcgccagcgtgcggagaaacctggcgccgcgaccagtgtatcgggggtcttggaaatggctaagaaagctggcctctgcctaggaggctctcggcaggggggctgccaatccgggatggttaccggaaatgaaccgcgcgatctggccctttcacacccacttagctttgtagggggtttgtagtctttacaggacaaaagggcacctattccagagcacacccccttttcttcctctcccttctgtgcctcactgctttccgatctcatagttgctcccaaaaaagaacagcaagaagcgattgaacacattgatgaagtacaaaatgaaatagacagacttaatgaacaagccagtgaggagattttgaaagtagaacagaaatataacaaactccgccaaccattttttcagaagaggtcagaattgatcgccaaaatcccaaatttttgggtaacaacatttgtcaaccatccacaagtgtctgcactgcttggggaggaagatgaagaggcactgcattatttgaccagagttgaagtgacagaatttgaagatattaaatcaggttacagaatagatttttattttgatgaaaatccttactttgaaaataaagttctctccaaagaatttcatctgaatgagagtggtgatccatcttcgaagtccaccgaaatcaaatggaaatctggaaaggatttgacgaaacgttcgagtcaaacgcagaataaagccagcaggaagaggcagcatgaggaaccagagagcttctttacctggtttactgaccattctgatgcaggtgctgatgagttaggagaggtcatcaaagatgatatttggccaaacccattacagtactacttggttcccgatatggatgatgaagaaggagaaggagaagaagatgatgatgatgatgaagaggaggaaggattagaagatattgacgaagaaggggatgaggatgaaggtgaagaagatgaagatgatgatgaaggggaggaaggagaggaggatgaaggagaagatgactaaatagaacactgatggattccaaccttcctttttttaaattttctccagtccctgggagcaagttgcagtctttttttttttttttttttttttccctcttgtgctcagtcgccctgttcttgaggtctcttttctctactccatggttctcaatttatttggggggaaataccttgagcagaatacaatgggaaaagagtctctacccctttctgttcgaagttcatttttatcccttcctgtctgaacaaaaactgtatggaatcaacaccaccgagctctgtgggaaaaaagaaaaacctgctcccttcgctctgctggaagctggagggtgctaggcccctgtgtagtagtgcatagaattctagcttttttcctcctttctctgtatattgggctcagagagtacactgtgtctctatgtgaatatggacagttagcatttaccaacatgtatctgtctactttctcttgtttaaaaaaagaaaaaaaaacttaaaaaaatggggttatagaaggtcagcaaagggtgggtttgagatgtttgggtgggttaagtgggcattttgacaacatggcttctcctttggcatgtttaattgtgatatttgacagacatccttgcagtttaagatgacacttttaaaataaattctctcctaatgatgacttgagccctgccactcaatgggagaatcagcagaacctgtaggatcttatttggaattgacattctctattgtaattttgttcctgtttatttttaaattttctttttgtttcactggaaaggaaagatgatgctcagttttaaacgttaaaagtgtacaagttgctttgttacaataaaactaaatgtgtacacaaaggatttgatgcttttctctcagcataggtatgcttactatgaccttccaagtttgacttgtataacatcactgtcaaactttgtcaccctaacttcgtattttttgatacgcactttgcaggatgacctcagggctatgtggattgagtaatgggatttgaatcaatgtattaatatctccatagctgggaaacgtgggttcaatttgccattggtttctgaaagtattcacatcatttgggataccagatagctcaatactctctgagtacattgtgcccttgatttttatctccaagtggcagtttttaaaattggccttttacctggatataaattaattgtgcctgccaccaccatccaacagacctggtgctctaatgccaagttatacacgggacagttgctggcatgtcttcattggctatataaaatgtggccaagaagataggctctcagtaagaagtctgatggtgagcagtaactgtccctgctttctggtataaagctctcaaatgtgaccatgtgaatctgggtgggataatggactcagctctgtctgctcaatgccattgtgcagagaagcaccctaatgcataagctttttaatgctgtaaaatatagtcgctgaaattaaatgccactttttcagaggtgaattaatggacagtctggtgaacttcaaaagctttttgatgtataaaacttgataaatggaactattccatcaataggcaaaagtgtaacaacctatctagatggatagtatgtaatttctgcacaggtctctgtttagtaaatacatcactgtataccgatcaggaatcttgctccaataaaggaacataaagattt

SEQ ID NO: 110 - DNA, 4476 bp, Homo sapien
catcttgcagccggcggcgcggattgaatgagcccgccgagcccgggccgccgtcgggagcagcgcaggccgcgagccgccgccaccatggccacgccgctgcccggccgcgcgggcgggcccgccacgccgctgtcgcccacgcgcctgtcgcggctgcaggagaaggaggagctgcgcgagctcaacgaccgcctggcgcactacatcgaccgcgtccgcgcgctggagctggagaacgaccggctcctgctcaagatctcagagaaggaggaggtgaccacgcgcgaggtgagtggcatcaaggcgctgtacgagtcggagctggccgatgcccggagagtcctggatgagacggctcgagagcgtgcccggctgcagatagagattgggaagctgagggcagagttggacgaggtcaacaagagcgccaagaagagggagggcgagcttacggtggcccagggccgtgtgaaggacctggagtccctgttccaccggagcgaggtggagctggcagctgccctcagcgacaagcgcggcctggagagtgacgtggctgagctgcgggcccagctggccaaggccgaggacggtcatgcagtggccaaaaagcagctggagaaggagacgctgatgcgtgtggacctggagaaccgctgccagagcctgcaggaggagctggacttccggaagagtgtgttcgaggaggaggtgcgggagacgcggcggcggcacgagcggcgcctggtggaggtggacagcagccggcagcaggagtacgacttcaagatggcacaggcgctggaggagctgcggagccagcacgacgagcaagtgcggctctacaagctggagctggagcagacctaccaggccaagctggacagcgccaagctgagctctgaccagaacgacaaggcggccagtgcggctcgcgaggagctgaaggaggcccgcatgcgcctggagtccctcagctaccagctctccggcctccagaagcaggccagtgccgctgaagatcgcattcgggagctggaggaggccatggccggggagcgggacaagttccggaagatgctggacgccaaggagcaggagatgacggagatgcgggacgtgatgcagcagcagctggccgagtaccaggagctgctggacgtgaagctggccctggacatggagatcaacgcctaccggaagctcctggagggcgaggaggagaggctgaagctgtcccccagcccatcctcgcgcgtcaccgtctcacgagccacctcgagcagcagcggcagcttgtccgccaccgggcgcctgggccgcagtaagcggaagcggctggaggtggaggagcccttgggcagcggcccaagcgtcctgggcacgggcacgggtggcagcggtggcttccacctggcccagcaggcctcggcctcgggtagcgtcagcatcgaggagatcgacctggagggcaagtttgtgcagctcaagaacaactcggacaaggatcagtctctggggaactggagaatcaagaggcaggtcttggagggggaggagatcgcctacaagttcacgcccaagtacatcctgcgcgccggccagatggtcacggtgtgggcagctggtgcgggggtggcccacagccccccctcgacgctggtgtggaagggccagagcagctggggcacgggcgagagcttccgcaccgtcctggttaacgcggatggcgaggaagtggccatgaggactgtgaagaagtcctcggtgatgcgtgagaatgagaatggggaggaagaggaggaggaagccgagtttggcgaggaggatcttttccaccaacagggggacccgaggaccacctcaagaggctgctacgtgatgtgaacccacactcctcatccacacacctttctttacccagagccactgaaaactatttttatatcattggctttctttagttcttgatacatttctagagaatttctaagcgaactgccagaacgtgtgggtgggtctcccccagccctccctcctggcgggtctcctccagcctcacttcgctgccacttcgccgctgccccggagacttttcaatcccaccccactcctcatctcaccatttggtcaaattggaagcccagggccaggacccggaggtttagaagatgcttgggcttggagggaggagggccggcgaggctagcgaggggacaggagacggccctgctgcggacggagcgcggaaactgcgtaggaattcagtggtggtgggtttttttaaggctttctacaaaaccaaattcagaatccaggcgtcgacctggtggggcccggggccaagcctgcattctggctgcccagcttcggacagcgggaactcctcaggcagccacgcagcgggtgtgggccagcatggggatggcgtggcccccagggcgggttttcactccgctgcctgggcttccagattcccgttctggcagcgcaccggccgggtttctcggaccgttgactttatttgggggagttttcccgcagttcagttcctgactgtgcaaggccaacagggcaggggaggggaagacctggggaaggaagaatgaggacagtcccgtcgtaagacctgtcacaacaataagcagggaggggagatgtggaggggacacatctggttgccttggaggcagaagctgtgagtttcagaacagctgtctgcagggaacgccaccatgttgaccctctggaggagagcgctgtggagcccctcccgtgttccagctccgtctgccctgtgcctatatatacacatgcgtctatccatactgtgcttttatctgtgattttctcgctgaaaccatgtttctcagacaggccaaggccacctgactcctatcacgacgcacccaagcccctcagtccagcttcccaatgcctggcaccccccttcggcaatagctcaccgtttacaccctccctcatagatacacagaagttatttttttaatggatatttatttttttacattggtcagtacacaggtcaggagctcacgccagggccttgaggacaggctgaccctcctccccggggtggcgtggggctggggcaccctccgacggcagagcctccttcagaaagtgcagctcaagtcttaaagacaccaaaactgagccatgggcacgcgccgtctccgggccatggcgttcactgcagggcgggggcggcaccgctccccatgtagatagaggggggcgcatcttaccaaagcatttcctcctggaggctacgccgctgtgctcccagtcaggcggctggtagggagctttgcctgccccggggataccctctgccagccgctggaagtgggaatgctggcgacagactgtgtcctctttcccaccttcatagcaggaatcacccggacccgactggctgggcttcgtgctagcgagggttctgggggtgggtcttggtgatcttgtcctatggggagtctgcagtggtctcagccacatcctatgtattttggctctggaggagcaaagctgtatcctggagttggtctgtgatttgccgacagccttgcaggctgggctcagggacaaagtcccccccaaaacccgcaggtcctcatgtccagacgctgcccagtcctgtcctgaaaacagcacgccccaggcccacagaaccccccaccctacatttgccttgggtggagctgggggtggtcctaggactgcgggtgcccttagctgaagggggtggggagaagcgtggactgggcagcctgtgggtaattggaggttcattgagaattgagtctttggaaacactaagaaaatcaaatttttaaaagttatttatggcctgggaaacaatttgcatttgtccccaaatacgcttagctgtgtgccgcttagaacgatgcgaaaccatccctctgtgtaagcccgtgccgtgtgactcgaagcctagcgccctccctgcgaagcatcagacgccacccagccctggggggaggcccacgcctgctggaccaacgcgggttctggggtgcacagcgccaggttaacgctgaagcctgccccgctgagcccaggagccgggaggcctgcgggctgacccagaatccgatcatgcacctgtcctcatgccagcggctttggctggggttggtctgaagcctgcacgcggcagttctttgttaaagatctgagggactcctcagtcctggggcgtcgccgcctgcagcctcttccaagccctgcgtccagcgagcgtcacagcacaacctgcaaaaacggagctgggctgcagctggggctggcatggactttcatttcagagattcggtttttaagaagatgcatgcctaatgtgttcttttttttttccaatgatttgtaatatacattttatgactggaaacttttttgtacaacactccaataaacattttgatttta

SEQ ID NO: 111 - DNA, 1887 bp, Homo sapien
gcctggtggcgaattcggcacgaggatgagcccgccgagcccgggccgccgtcgggagcagcgcaggccgcgagccgccgccaccatggccacgccgctgcccggccgcgcgggcgggcccgccacgccgctgtcgcccacgcgcctgtcgcggctgcaggagaaggaggagctgcgcgagctcaacgaccgcctggcgcactacatcgaccgcgtccgcgcgctggagctggagaacgaccggctcctgctcaagatctcagagaaggaggaggtgaccacgcgcgaggtgagtggcatcaaggcgctgtacgagtcggagctggccgatgcccggagagtcctggatgagacggctcgagagcgtgcccggctgcagatagagattgggaagctgagggcagagttggacgaggtcaacaagagcgccaagaagagggagggcgagcttacggtggcccagggccgtgtgaaggacctggagtccctgttccaccggagcgaggtggagctggcagctgccctcagcgacaagcgcggcctggagagtgacgtggctgagctgcgggcccagctggccaaggccgaggacggtcatgcagtggccaaaaagcagctggagaagggctgtccttgctctcagaagtcccggtcccatgtagatagaggggggcgcatcttaccaaagcatttcctcctggaggctacgccgctgtgctcccagtcaggcggctggtagggagctttgcctgccccggggataccctctgccagccgctggaagtgggaatgctggcgacagactgtgtcctctttcccaccttcatagcaggaatcacccggacccgactggctgggcttcgtgctagcgagggttctgggggtgggtcttggtgatcttgtcctatggggagtctgcagtggtctcagccacatcctatgtattttggctctggaggagcaaagctgtatcctggagttggtctgtgatttgccgacagccttgcaggctgggctcagggacaaagtcccccccaaaacccgcaggtcctcatgtccagacgctgcccagtcctgtcctgaaaacagcacgccccaggcccacagaaccccccaccctacatttgccttgggtggagctgggggtggtcctaggactgcgggtgcccttagctgaagggggtggggagaagcgtggactgggcagcctgtgggtaattggaggttcattgagaattgagtctttggaaacactaagaaaatcaaatttttaaaagttatttatggcctgggaaacaatttgcatttgtccccaaatacgcttagctgtgtgccgcttagaacgatgcgaaaccatccctctgtgtaagcccgtgccgtgtgactcgaagcctagcgccctccctgcgaagcatcagacgccacccagccctggggggaggcccacgcctgctggaccaacgcgggttctggggtgcacagcgccaggttaacgctgaagcctgccccgctgagcccaggagccgggaggcctgcgggctgacccagaatccgatcatgcacctgtcctcatgccagcggctttggctggggttggtctgaagcctgcacgcggcagttctttgttaaagatctgagggactcctcagtcctggggcgtcgccgcctgcagcctcttccaagccctgcgtccagcgagcgtcacagcacaacctgcaaaaacggagctgggctgcagctggggctggcatggactttcatttcagagattcggtttttaagaagatgcatgcctaatgtgttcttttttttttccaatgatttgtaatatacattttatgactggaaacttttttgtacaacactccaataaacattttgatttta

SEQ ID NO: 112 - DNA, 4041 bp, Homo sapien
catcttgcagccggcggcgcggattgaatgagcccgccgagcccgggccgccgtcgggagcagcgcaggccgcgagccgccgccaccatggccacgccgctgcccggccgcgcgggcgggcccgccacgccgctgtcgcccacgcgcctgtcgcggctgcaggagaaggaggagctgcgcgagctcaacgaccgcctggcgcactacatcgaccgcgtccgcgcgctggagctggagaacgaccggctcctgctcaagatctcagagaaggaggaggtgaccacgcgcgaggtgagtggcatcaaggcgctgtacgagtcggagctggccgatgcccggagagtcctggatgagacggctcgagagcgtgcccggctgcagatagagattgggaagctgagggcagagttggacgaggtcaacaagagcgccaagaagagggagggcgagcttacggtggcccagggccgtgtgaaggacctggagtccctgttccaccggagcgaggtggagctggcagctgccctcagcgacaagcgcggcctggagagtgacgtggctgagctgcgggcccagctggccaaggccgaggacggtcatgcagtggccaaaaagcagctggagaaggagacgctgatgcgtgtggacctggagaaccgctgccagagcctgcaggaggagctggacttccggaagagtgtgttcgaggaggaggtgcgggagacgcggcggcggcacgagcggcgcctggtggaggtggacagcagccggcagcaggagtacgacttcaagatggcacaggcgctggaggagctgcggagccagcacgacgagcaagtgcggctctacaagctggagctggagcagacctaccaggccaagctggacagcgccaagctgagctctgaccagaacgacaaggcggccagtgcggctcgcgaggagctgaaggaggcccgcatgcgcctggagtccctcagctaccagctctccggcctccagaagcaggccagtgccgctgaagatcgcattcgggagctggaggaggccatggccggggagcgggacaagttccggaagatgctggacgccaaggagcaggagatgacggagatgcgggacgtgatgcagcagcagctggccgagtaccaggagctgctggacgtgaagctggccctggacatggagatcaacgcctaccggaagctcctggagggcgaggaggagaggctgaagctgtcccccagcccatcctcgcgcgtcaccgtctcacgagccacctcgagcagcagcggcagcttgtccgccaccgggcgcctgggccgcagtaagcggaagcggctggaggtggaggagcccttgggcagcggcccaagcgtcctgggcacgggcacgggtggcagcggtggcttccacctggcccagcaggcctcggcctcgggtagcgtcagcatcgaggagatcgacctggagggcaagtttgtgcagctcaagaacaactcggacaaggatcagtctctggggaactggagaatcaagaggcaggtcttggagggggaggagatcgcctacaagttcacgcccaagtacatcctgcgcgccggccagatggtcacggtgtgggcagctggtgcgggggtggcccacagccccccctcgacgctggtgtggaagggccagagcagctggggcacgggcgagagcttccgcaccgtcctggttaacgcggatggcgaggaagtggccatgaggactgtgaagaagtcctcggtgatgcgtgagaatgagaatggggaggaagaggaggaggaagccgagtttggcgaggaggatcttttccaccaacagggggacccgaggaccacctcaagaggctgctacgtgatgtgaacccacactcctcatccacacacctttctttacccagagccactgaaaactatttttatatcattggctttctttagttcttgatacatttctagagaatttctaagcgaactgccagaacgtgtgggtgggtctcccccagccctccctcctggcgggtctcctccagcctcacttcgctgccacttcgccgctgccccggagacttttcaatcccaccccactcctcatctcaccatttggtcaaattggaagcccagggccaggacccggaggtttagaagatgcttgggcttggagggaggagggccggcgaggctagcgaggggacaggagacggccctgctgcggacggagcgcggaaactgcgtaggaattcagtggtggtgggtttttttaaggctttctacaaaaccaaattcagaatccaggcgtcgacctggtggggcccggggccaagcctgcattctggctgcccagcttcggacagcgggaactcctcaggcagccacgcagcgggtgtgggccagcatggggatggcgtggcccccagggcgggttttcactccgctgcctgggcttccagattcccgttctggcagcgcaccggccgggtttctcggaccgttgactttatttgggggagttttcccgcagttcagttcctgactgtgcaaggccaacagggcaggggaggggaagacctggggaaggaagaatgaggacagtcccgtcgtaagacctgtcacaacaataagcagggaggggagatgtggaggggacacatctggttgccttggaggcagaagctgtgagtttcagaacagctgtctgcagggaacgccaccatgttgaccctctggaggagagcgctgtggagcccctcccgtgttccagctccgtctgccctgtgcctatatatacacatgcgtctatccatactgtgcttttatctgtgattttctcgctgaaaccatgtttctcagacaggccaaggccacctgactcctatcacgacgcacccaagcccctcagtccagcttcccaatgcctggcaccccccttcggcaatagctcaccgtttacaccctccctcatagatacacagaagttatttttttaatggatatttatttttttacattggtcagtacacaggtcaggagctcacgccagggccttgaggacaggctgaccctcctccccggggtggcgtggggctggggcaccctccgacggcagagcctccttcagaaagtgcagctcaagtcttaaagacaccaaaactgagccatgggcacgcgccgtctccgggccatggcgttcactgcagggcgggggcggcaccgctcccctgtgactgcatcccgcctccctggggacctgcctgtggcaggaaggaatggggggccccagccccaggccgggaaggagccagcggccgacaaagcagaaacacccgctgctccacgtagcccctgctcgctgtccttgctctcagaagtcccggtcccatgtagatagaggggggcgcatcttaccaaagcatttcctcctggaggctacgccgctgtgctcccagtcaggcggctggtagggagctttgcctgccccggggataccctctgccagccgctggaagtgggaatgctggcgacagactgtgtcctctttcccaccttcatagcaggaatcacccggacccgactggctgggcttcgtgctagcgagggttctgggggtgggtcttggtgatcttgtcctatggggagtctgcagtggtctcagccacatcctatgtattttggctctggaggagcaaagctgtatcctggagttggtctgtgatttgccgacagccttgcaggctgggctcagggacaaagtcccccccaaaacccgcaggtcctcattcctggggcgtcgccgcctgcagcctcttccaagccctgcgtccagcgagcgtcacagcacaacctgcaaaaacggagctgggctgcagctggggctggcatggactttcatttcagagattcggtttttaagaagatgcatgcctaatgtgttcttttttttttccaatgatttgtaatatacattttatgactggaaacttttttgtacaacactccaataaacattttgatttta

SEQ ID NO: 113 - protein, 165 aa, Homo sapien
GGRNRGRAGSQGGRGGGAQAAARVNRGGGPIRNRPAIARGAAGGGGRNRPAPYSRPKQLPDKWQHDLFDSGFGGGAGVETGGKLLVSNLDFGVSDADIQELFAEFGTLKKAAVHYDRSGRSLGTADVHFERKADALKAMKQYNGVPLDASYIPPLLQLLPEDSLL

SEQ ID NO: 114 - protein, 164 aa, Homo sapien
  MISC_FEATURE (4)..(4): X=any amino acid
GAGXAPGRLQGGRGGGAQAAARVNRGGGPIRNRPAIARGAAGGGGRNRPAPYSRPKQLPDKWQHDLFDSGFGGGAGVETGGKLLVSNLDFGVSDADIQELFAEFGTLKKAAVHYDRSGRSLGTADVHFERKADALKAMKQYNGVPLDASYIPPLLQLLPEDSLL

SEQ ID NO: 115 - protein, 256 aa, Homo sapien
MALRVTRNSKINAENKAKINMAGAKRVPTAPAATSKPGLRPRTALGDIGNKVSEQLQAKMPMKKEAKPSATGKVIDKKLPKPLEKVPMLVPVPVSEPVPEPEPEPEPEPVKEEKLSPEPILVDTASPSPMETSGCAPAEEDLCQAFSDVILAVNDVDAEDGADPNLCSEYVKDIYAYLRQLEEEQAVRPKYLLGREVTGNMRAILIDWLVQVQMKSVCAGPVCGPIDGPAKLGAQIAGGPAVWPLKGPRGRWGTLA

SEQ ID NO: 116 - protein, 250 aa, Homo sapien
AGSSRRAAAERLLVSAGCRSLAGRASGVLLLPAELLPGEEEAMALRVTRNSKINAENKAKINMAGAKRVPTAPAATSKPGLRPRTALGDIGNKVSEQLQAKMPMKKEAKPSATGKVIDKKLPKPLEKVPMLVPVPVSEPVPEPEPEPEPEPVKEEKLSPEPILVDTASPSPMETSGCAPAEEDLCQAFSDVILAVNDVDAEDGADPNLCSEYVKDIYAYLRQLEEEQAVRPKYLLGREVTGNMRAILIDW

SEQ ID NO: 117 - protein, 406 aa, Homo sapien
MEAAAVTVTRSATRRRRRQLQGLAAPEAGTQEEQEDQEPRPRRRRPGRSIKDEEEETVFREVVSFSPDPLPVRYYDKDTTKPISFYLSSLEELLAWKPRLEDGFNVALEPLACRQPPLSSQRPRTLLCHDMMGGYLDDRFIQGSVVQTPYAFYHWQCIDVFVYFSHHTVTIPPVGWTNTAHRHGVCVLGTFITEWNEGGRLCEAFLAGDERSYQAVADRLVQITQFFRFDGWLINIENSLSLAAVGNMPPFLRYLTTQLHRQVPGGLVLWYDSVVQSGQLKWQDELNQHNRVFFDSCDGFFTNYNWREEHLERMLGQAGERRADVYVGVDVFARGNVVGGRFDTDKVGGGFRPRASGPVPPLGPHFLMDLPFPSAPQRNDSSCSSQSGDPVALRNRCPAPAKLCPH

SEQ ID NO: 118 - protein, 525 aa, Homo sapien
MEAAAVTVTRSATRRRRRQLQGLAAPEAGTQEEQEDQEPRPRRRRPGRSIKDEEEETVFREVVSFSPDPLPVRYYDKDTTKPISFYLSSLEELLAWKPRLEDGFNVALEPLACRQPPLSSQRPRTLLCHDMMGGYLDDRFIQGSVVQTPYAFYHWQCIDVFVYFSHHTVTIPPVGWTNTAHRHGVCVLGTFITEWNEGGRLCEAFLAGDERSYQAVADRLVQITQFFRFDGWLINIENSLSLAAVGNMPPFLRYLTTQLHRQVPGGLVLWYDSVVQSGQLKWQDELNQHNRVFFDSCDGFFTNYNWREEHLERMLGQAGERRADVYVGVDVFARGNVVGGRFDTDKSLELIRKHGFSVALFAPGWVYECLEKKDFFQNQDKFWGRLERYLPTHSICSLPFVTSFCLGMGARRVCYGQEEAVGPWYHLSAQEIQPLFGEHRLGGDGRGWVRTHCCLEDAWHGGSSLLVRGVIPPEVGNVAVRWVSDGGRWAHQLLPSHVVAMELDRWGSGGQNKDRGQTQMGFLKL

SEQ ID NO: 119 - protein, 327 aa, Homo sapien [sequence omitted]

SEQ ID NO: 120 - protein, 384 aa, Homo sapien
QIPRTVSSCRTGLSPLHISPPSSPSPPKPPLYSASVSLDTLDAPYEGIPYGISELRCFSPQKNLALGEDLSPGYGQDHDVGAFGTQAPCSWREGLVDAIWSWLRFLSGLSTAPITGPFSPGYFYSLQAPVPPKIYLSMVYKLEGPTDVTVALELTTGDAGSCHIGGISVLNAETSSRHSLRPLRVPPTKLARWVGRCGRQLSGGWVQHCYEVSLRGCLLLDLLVCFSRPPGSREEESFTCRLGEIQVVDAASLLAPLPQVQAVTISHIRWQPSASEREGPPALLQLSCTLHWSFLLSQVRCFRIHCWGGMSDDSPGRELPRPEMPMFLGLAFATQYRIVDLLVEAAGPGQDRRMEFLVEPVPKEGFRVPQAEWGRAVLLYSAPA

SEQ ID NO: 121 - protein, 450 aa, Homo sapien
QIPRTVSSCRTGLSPLHISPPSSPSPPKPPLYSASVSLDTLDAPYEGIPYGISELRCFSPQKNLALGEDLSPGYGQDHDVGAFGTQAPCSWREGLVDAIWSWLRFLSGLSTAPITGPFSPGYFYSLQAPVPPKIYLSMVYKLEGPTDVTVALELTTGDAGSCHIGGISVLNAETSSRHSLRPLRVPPTKLARWVGRCGRQLSGGWVQHCYEVSLRGCLLLDLLVCFSRPPGSREEESFTCRLGEIQVMLPRGARAGLAVCPAGVGVEAAPGRPLLGFSGELGWRSQGGEMCAWGHPLPAPGRPAVLSLLSCQVVDAASLLAPLPQVQAVTISHIRWQPSASEREGPPALLQLSCTLHWSFLLSQVRCFRIHCWGGMSDDSPGRELPRPEMPMFLGLAFATQYRIVDLLVEAAGPGQDRRMEFLVEPVPKEGFRVPQAEWGRAVLLYSAPA

SEQ ID NO: 122 - protein, 302 aa, Homo sapien
MEAAAVTVTRSATRRRRRQLQGLAAPEAGTQEEQEDQEPRPRRRRPGRSIKDEEEETVFREVVSFSPDPLPVRYYDKDTTKPISFYLSSLEELLAWKPRLEDGFNVALEPLACRQPPLSSQRPRTLLCHDMMGGYLDDRFIQGSVVQTPYAFYHWQCIDVFVYFSHHTVTIPPVGWTNTAHRHGVCVLGTFITEWNEGGRLCEAFLAGDERSYQAVADRLVQITQFFRFDGWLINIENSLSLAAVGNMPPFLRYLTTQLLVEAAGPGQDRRMEFLVEPVPKEGFRVPQAEWGRAVLLYSAPA

SEQ ID NO: 123 - protein, 162 aa, Homo sapien
MPRWYFLLARCFGCAVIEDTWHYFLHRLLHHKRIYKYIHKVHHEFQAPFGMEAEYAHPLETLILGTGFFIGIVLLCDHVILLWAWVTIRLLETIDVHSGYDIPLNPLNLIPFYAGSRHHDFHHMNFIGNYASTFTWWDRIFGTDSQYNAYNEKRKKFEKKTE

SEQ ID NO: 124 - protein, 206 aa, Homo sapien
MGEPQGSMRILVTGGSGLVGKAIQKVVADGAGLPGEDWVFVSSKDADLTDTAQTRALFEKVQPTHVIHLAAMVGGLFRNIKYNLDFWRKNVHMNDNVLHSAFEVGARKVVSCLSTCIFPDKTTYPIDETMIHNGPPHNSNFGYSYAKRMIDVQNSAGPTSSSTAAPSPLSSPPTSSGPTTTSTSRMATCCLASSTRCTWPRAAARP

SEQ ID NO: 125 - protein, 380 aa, Homo sapien
LQVPAVPGTLRAPGTPFPRVPRPSLPAPPPTWLRGQPERTRPEAAVGEPAVGLDAGATDMGEPQGSMRILVTGGSGLVGKAIQKVVADGAGLPGEDWVFVSSKDADLTDTAQTRALFEKVQPTHVIHLAAMVGGLFRNIKYNLDFWRKNVHMNDNVLHSAFEVGARKVVSCLSTCIFPDKTTYPIDETMIHNGPPHNSNFGYSYAKRMIDVQNRAYFQQYGCTFTAVIPTNVFGPHDNFNIEDGHVLPGLIHKVHLAKSSGSALTVWGTGNPRRQFIYSLDLAQLFIWVLREYNEVEPIILSVGEEDEVSIKEAAEAVVEAMDFHGEVTFDTTKSDGQFKKTASNSKLRTYLPDFRFTPFKQAVKETCAWFTDNYEQARK

SEQ ID NO: 126 - protein, 380 aa, Homo sapien; identical to SEQ ID NO: 125

SEQ ID NO: 127 - protein, 334 aa, Homo sapien
MRALAANRVNDLCQEPPSQGCLPPPLVSQRGVECTFSRPSGESWVGTSCSGLGGSSGPLRRCRLRAPRGTGLRRGSASVQLGLSGCQWTMPHSEGLTLCQLPQKSGAPKDESVMTSASHCLTLQGATDMGEPQGSMRILVTGGSGLVGKAIQKVVADGAGLPGEDWVFVSSKDADLTDTAQTRALFEKVQPTHVIHLAAMVGGLFRNIKYNLDFWRKNVHMNDNVLHSAFEVGARKVVSCLSTCIFPDKTTYPIDETMIHNGPPHNSNFGYSYAKRMIDVQNSAGPTSSSTAAPSPLSSPPTSSGPTTTSTSRMATCCLASSTRCTWPRAAARP

SEQ ID NO: 128 - protein, 327 aa, Homo sapien
HYSATDMGEPQGSMRILVTGGSGLVGKAIQKVVADGAGLPGEDWVFVSSKDADLTDTAQTRALFEKVQPTHVIHLAAMVGGLFRNIKYNLDFWRKNVHMNDNVLHSAFEVGARKVVSCLSTCIFPDKTTYPIDETMIHNGPPHNSNFGYSYAKRMIDVQNRAYFQQYGCTFTAVIPTNVFGPHDNFNIEDGHVLPGLIHKVHLAKSSGSALTVWGTGNPRRQFIYSLDLAQLFIWVLREYNEVEPIILSVGEEDEVSIKEAAEAVVEAMDFHGEVTFDTTKSDGQFKKTASNSKLRTYLPDFRFTPFKQAVKETCAWFTDNYEQARK

SEQ ID NO: 129 - protein, 161 aa, Homo sapien
MGEPQGSMRILVTGGSGLVGKAIQKVVADGAGLPGEDWVFVSSKDADLTDTAQTRALFEKVQPTHVIHLAAMVGGLFRNIKYNLDFWRKNVHMNDNVLHSAFEVGARKVVSCLSTCIFPDKTTYPIDETMIHNGPPHNSNFGYSYAKRMIDVQNRSSRPSC

SEQ ID NO: 130 - protein, 326 aa, Homo sapien
LQVPAVPGTLRAPGTPFPRVPRPSLPAPPPTWLRGQPERTRPEAAVGEPAVGLDAGATDMGEPQGSMRILVTGGSGLVGKAIQKVVADGAGLPGEDWVFVSSKDADLTDTAQTRALFEKVQPTHVIHLAAMVGGLFRNIKYNLDFWRKNVHMNDNVLHSAFEVGARKVVSCLSTCIFPDKTTYPIDETMIHNGPPHNSNFGYSYAKRMIDVQNRAYFQQYGCTFTAVIPTNVFGPHDNFNIEDGHVLPGLIHKVHLAKSSGSALTVWGTGNPRRQFIYSLDLAQLFIWVLREYNEVEPIILSGGYLSPQPPSSMVGQDPRLSWEAG

SEQ ID NO: 131 - protein, 216 aa, Homo sapien
MQVRTDPRSRQCWPLEHRTWLTDSHSSCLFPLPLEQPSLLQSNPCPSFLPLSRAAPPAHLRPGPSYLLPLLSCPIPVVRRESTGQRPSSTCDLGECQASPRGPGPRGPGRLCCGGSRVRTGAASPLAVCLCPLHWPLEAQRPSGYFPSSGLPLMLFPAPFFYLETPIPSHPLQRSSQSCPQHGSLHSPWVSPPVSCLPRTPDLPLPGWPRWILYSD

SEQ ID NO: 132 - protein, 108 aa, Homo sapien
MAHATLSAAPSNPRLLRVALLLLLLVAASRRAAGGSRRPGVPGPDAAGVGAPRRTAPLNQRVYSSLGASVVTELRCQCLQTLQGIHLKNIQSVNVRSPGPHCAQTEVM

SEQ ID NO: 133 - protein, 142 aa, Homo sapien
KGSPILGSHTARVAGTSPPALPLLAQLPDASAEPHGPRHALRRPQQSPAPAGGAAAPAPGGRQPARSRWVPAPWGPRAGRGWGGRPAPTAPLNQRVYSSLGASVVTELRCQCLQTLQGIHLKNIQSVNVRSPGPHCAQTEVM

SEQ ID NO: 134 - protein, 482 aa, Homo sapien
MVMEKPSPLLVGREFVRQYYTLLNKAPEYLHRFYGRNSSYVHGGVDASGKPQEAVYGQNDIHHKVLSLNFSECHTKIRHVDAHATLSDGVVVQVMGLLSNSGQPERKFMQTFVLAPEGSVPNKFYVHNDMFRYEDEVFGDSEPELDEESEDEVEEEQEERQPSPEPVQENANSGYYEAHPVTNGIEEPLEESSHEPEPEPESETKTEELKPQVEEKNLEELEEKSTTPPPAEPVSLPQEPPKAFSWASVTSKNLPPSGTVSSSGIHPMLKHQSHSQESKLNQKFNLSHLVCVNNDLENDLVFLLEDQDQAEEIMEQNDSDNRRIIRYPDSHQLFVGNLPHDIDENELKEFFMSFGNVVELRINTKGVGGKLPNFGFVVFDDSEPVQRILIAKPIMFRGEVRLNVEEKKTRAARERETRGGGDDRRDIRRNDRGPGGPRGIVGGGMMRDRDGRGPPPRGGMAQKLGSGRGTGQMEGRFTGQRR

SEQ ID NO: 135 - protein, 392 aa, Homo sapien
LSRSWVCCLTVDNQKESLCKPLFWLLKDLFQINFMFTMICFVMKMKCYGDSEPELDEESEDEVEEEQEERQPSPEPVQENANSGYYEAHPVTNGIEEPLEESSHEPEPEPESETKTEELKPQVEEKNLEELEEKSTTPPPAEPVSLPQEPPKAFSWASVTSKNLPPSGTVSSSGIPPHVKAPVSQPRVEAKPEVQSQPPRVREQRPRERPGFPPRGPRPGRGDMEQNDSDNRRIIRYPDSHQLFVGNLPHDIDENELKEFFMSFGNVVELRINTKGVGGKLPNFGFVVFDDSEPVQRILIAKPIMFRGEVRLNVEEKKTRAARERETRGGGDDRRDIRRNDRGPGGPRGIVGGGMMRDRDGRGPPPRGGMAQKLGSGRGTGQMEGRFTGQRR

SEQ ID NO: 136 - protein, 316 aa, Homo sapien
DWEEKRVLAICLASQSEDEVEEEQEERQPSPEPVQENANSGYYEAHPVTNGIEEPLEESSHEPEPEPESETKTEELKPQVEEKNLEELEEKSTTPPPAEPVSLPQEPPKPRVEAKPEVQSQPPRVREQRPRERPGFPPRGPRPGRGDMEQNDSDNRRIIRYPDSHQLFVGNLPHDIDENELKEFFMSFGNVVELRINTKGVGGKLPNFGFVVFDDSEPVQRILIAKPIMFRGEVRLNVEEKKTRAARERETRGGGDDRRDIRRNDRGPGGPRGIVGGGMMRDRDGRGPPPRGGMAQKLGSGRGTGQMEGRFTGQRR

SEQ ID NO: 137 - protein, 314 aa, Homo sapien
  MISC_FEATURE (4)..(4): X=any amino acid
LGGXESQLLLASQSEDEVEEEQEERQPSPEPVQENANSGYYEAHPVTNGIEEPLEESSHEPEPEPESETKTEELKPQVEEKNLEELEEKSTTPPPAEPVSLPQEPPKPRVEAKPEVQSQPPRVREQRPRERPGFPPRGPRPGRGDMEQNDSDNRRIIRYPDSHQLFVGNLPHDIDENELKEFFMSFGNVVELRINTKGVGGKLPNFGFVVFDDSEPVQRILIAKPIMFRGEVRLNVEEKKTRAARERETRGGGDDRRDIRRNDRGPGGPRGIVGGGMMRDRDGRGPPPRGGMAQKLGSGRGTGQMEGRFTGQRR

SEQ ID NO: 138 - protein, 169 aa, Homo sapien
MEQNDSDNRRIIRYPDSHQLFVGNLPHDIDENELKEFFMSFGNVVELRINTKGVGGKLPNFGFVVFDDSEPVQRILIAKPIMFRGEVRLNVEEKKTRAARERETRGGGDDRRDIRRNDRGPGGPRGIVGGGMMRDRDGRGPPPRGGMAQKLGSGRGTGQMEGRFTGQRR

SEQ ID NO: 139 - protein, 147 aa, Homo sapien
MGRVRTKTVKKAARVIIEKYYTRLGNDFHTNKRVCEEIAIIPSKKLRNKIAGYVTHLMKRIQRGPVRGISIKLQEEERERRDNYVPEVSALDQEIIEVDPDTKEMLKLLDFGSLSNLQVIHPNCRLSDLKVGQTAVGMNFKTPRGPV

SEQ ID NO: 140 - protein, 166 aa, Homo sapien
  MISC_FEATURE (129)..(129): X=any amino acid
  MISC_FEATURE (134)..(134): X=any amino acid
ALTGFACASCFLFYQGPANMGRVRTKTVKKAARVIIEKYYTRLGNDFHTNKRVCEEIAIIPSKKLRNKIAGYVTHLMKRIQRGPVRGISIKLQEEERERRDNYVPEVSALDQEIIEVDPDTKEMLKLLXFGSLXNLQVIHPNCRLSDLKVGQTAVGMNFKTPRGPV

SEQ ID NO: 141 - protein, 254 aa, Homo sapien
MSVNAIRKQSTDEEVTSLAKSLIKSWKKLLDGPSTEKDLDEKKKEPAITSQNSPEAREESTSSGNVSNRKDETNARDTYVSSFPRAPSTSDSVRLKCREMLAAALRTGDDYIAIGADEEELGSQIEEAIYQEIRNTDMKYKNRVRSRISNLKDAKNPNLRKNVLCGNIPPDLFARMTAEEMASDELKEMRKNLTKEAIREHQMAKTGGTQTDLFTCGKCKKKNCTYTQVQTRSADEPMTTFVVCNECGNRWKFC

SEQ ID NO: 142 - protein, 302 aa, Homo sapien
RGLNVRLVISTVLHVCLAIKNAAGALDLLKELKNIPMTLELLQSTRIGMSVNAIRKQSTDEEVTSLAKSLIKSWKKLLDGPSTEKDLDEKKKEPAITSQNSPEAREESTSSGNVSNRKDETNARDTYVSSFPRAPSTSDSVRLKCREMLAAALRTGDDYIAIGADEEELGSQIEEAIYQEIRNTDMKYKNRVRSRISNLKDAKNPNLRKNVLCGNIPPDLFARMTAEEMASDELKEMRKNLTKEAIREHQMAKTGGTQTDLFTCGKCKKKNCTYTQVQTRSADEPMTTFVVCNECGNRWKFC

SEQ ID NO: 143 - protein, 225 aa, Homo sapien
MVSHSELRKLFYSADAVCFDVDSTVIREEGIDELAKICGVEDAVSEMTRRAMGGAVPFKAALTERLALIQPSREQVQRLIAEQPPHLTPGIRELVSRLQERNVQVFLISGGFRSIVEHVASKLNIPATNVFANRLKFYFNGEYAGFDETQPTAESGGKGKVIKLLKEKFHFKKIIMIGDGATDMEACPPADAFIGFGGNVIRQQVKDNAKWYITDFVELLGELEE

SEQ ID NO: 144 - protein, 249 aa, Homo sapien [sequence omitted]

SEQ ID NO: 145 - protein, 113 aa, Homo sapien [sequence omitted]

SEQ ID NO: 146 - protein, 102 aa, Homo sapien
MVTEEKRSEARENERSLAFVKMVGHHVAFLEADVLQAERDHGAFPQALRRWLGSAGLPSFRNKSPAPVPVTYELPTLYRTEDYFPVDAGEAQHHPRTCPRPL

SEQ ID NO: 147 - protein, 412 aa, Homo sapien
MTHRRFKVTSTVAAASLLPLQDEKEVLLCKPAWLSPSGTRTGGFLAVPGPPLRAKGPPVLWPPPAHPPRVPGREHSRWGRSPPAQRAALGLRPYLLLLLPPAQLFNVYPWLGALLQLHRPVLRKIEEVRAILRTLLEARRPHVCPGDPVCSYVDALIQQGQGDDPEGLFAEANAVACTLDMVMAGTETTSATLQWAALLMGRHPDVQGETPAPGETAPSAPGGPPGTRDGAATQAAQPFAPGRVQEELDRVLGPGRTPRLEDQQALPYTSAVLHEVQRFITLLPHVPRCTAADTQLGGFLLPKGTPVIPLLTSVLLDETQWQTPGQFNPGHFLDANGHFVKREAFLPFSAGRRVCVGERLARTELFLLFAGLLQRYRLLPPPGVSPASLDTTPARAFTMRPRAQALCAVPRP

SEQ ID NO: 148 - protein, 203 aa, Homo sapien
DPGAWRDGSFCPRGTPRDEGWRCHPSGPPFAPGRVQEELDRVLGPGRTPRLEDQQALPYTSAVLHEVQRFITLLPHVPRCTAADTQLGGFLLPKGTPVIPLLTSVLLDETQWQTPGQFNPGHFLDANGHFVKREAFLPFSAGRRVCVGERLARTELFLLFAGLLQRYRLLPPPGVSPASLDTTPARAFTMRPRAQALCAVPRP

SEQ ID NO: 149 - protein, 116 aa, Homo sapien
MARDIVAMSRAMCLMLLSVARAFLLMVVRTEEVAGFRWPDLRFNDHHDTFAVGCRLHAHSLAVNQSVVAEGIAGPQVIGLSAVVFGLSFENMENWSSSARPIQLLMPEHRYADIRQ

SEQ ID NO: 150 - protein, 141 aa, Homo sapien
GERPLSWSPLGRGHLCLVPLGGRRGACAGKSRRPRWADHEVRSSRPAWPTWHTWHAHRGDVACHVSDAAERGASILVDGGPHIGGGRLPLAGSPLNDHHDTFAVGCRLHAHSLAVNQSVVAEGIAGPQVIGLSAVVFGLSF

SEQ ID NO: 151 - protein, 426 aa, Homo sapien
MSPAPDAAPAPASISLFDLSADAPVFQGLSLVSHAPGEALARAPRTSCSGSGERESPERKLLQGPMDISEKLFCSTCDQTFQNHQEQREHYKLDWHRFNLKQRLKDKPLLSALDFEKQSSTGDLSSISGSEDSDSASEEDLQTLDRERATFEKLSRPPGFYPHRVLFQNAQGQFLYAYRCVLGPHQDPPEEAELLLQNLQSRGPRDCVVLMAAAGHFAGAIFQGREVVTHKTFHRYTVRAKRGTAQGLRDARGGPSHSAGANLRRYNEATLYKDVRDLLAGPSWAKALEEAGTILLRAPRSGRSLFFGGKGAPLQRGDPRLWDIPLATRRPTFQELQRVLHKLTTLHVYEEDPREAVRLHSPQTHWKTVREERKKPTEEEIRKICRDEKEALGQNEESPKQGLITIWQLSDLSFCPKNALANSLLS

SEQ ID NO: 152 - protein, 370 aa, Homo sapien
MSPAPDAAPAPASISLFDLSADAPVFQGLSLREHYKLDWHRFNLKQRLKDKPLLSALDFEKQSSTGDLSSISGSEDSDSASEEDLQTLDRERATFEKLSRPPGFYPHRVLFQNAQGQFLYAYRCVLGPHQDPPEEAELLLQNLQSRGPRDCVVLMAAAGHFAGAIFQGREVVTHKTFHRYTVRAKRGTAQGLRDARGGPSHSAGANLRRYNEATLYKDVRDLLAGPSWAKALEEAGTILLRAPRSGRSLFFGGKGAPLQRGDPRLWDIPLATRRPTFQELQRVLHKLTTLHVYEEDPREAVRLHSPQTHWKTVREERKKPTEEEIRKICRDEKEALGQNEESPKQGLITIWQLSDLSFCPKNALANSLLS

SEQ ID NO: 153 - protein, 208 aa, Homo sapien
MSPAPDAAPAPASISLFDLSADAPVFQGLSLVSHAPGEALARAPRTSCSGSGERESPERKLLQGPMDISEKLFCSTCDQTFQNHQEQREHYKLDWHRFNLKQRLKDKPLLSALDFEKQSSTGDLSSISGSEDSDSASEEDLQTLDRERATFEKLSRPPGFYPHRVLFQNAQGQFLYAYRCVLGPHQRQVTVQVAWLTPAFCTPSLDFP

SEQ ID NO: 154 - protein, 209 aa, Homo sapien
WTQLLMCYFYLGDKIKTISFQAFILMHLLLPSEYSLDGFHMSGFSLGSGSEGEDGFQVELELVELTVGTLDLCESEVLPKRRRRKRNKKEKSRDQEAGAHRTLLQQTQEEEPSTQSSQAVAAPLGPLLDEAKAPGQPELWNALLAACRAGDVGVLKLQLAPSPADPRVLSLLSAPLGSGGFTLLHAAAAAGRGSVVRLLLEAGADPTVQ

SEQ ID NO: 155 - protein, 125 aa, Homo sapien
MSPAPDAAPAPASISLFDLSADAPVFQGLSLVSHAPGEALARAPRTSCSGSGERESPERKLLQGPMDISEKLFCSTCDQTFQNHQEQREHYKLDWHRFNLKQRLKDKPLLSALDFEKQSSTGDEW

SEQ ID NO: 156 - protein, 191 aa, Homo sapien
EPSLDRPGDDQLVLGGGLCRVEGSQVPVPALSPATAPTSFEGPFGKIVHQVRAAIHTPRFSKDHKCSLVFYILSPHFLDPVFLSTKSHSQRQPLLATLSSVPGAPEPCPQDGSPASHPLHPPLCISTGATVPYFAEGSGGPVPTTSTLILPPEYSSWGYPYGESTARAWQGGDAKSPTQTLLSSRRGPTVL

SEQ ID NO: 157 - protein, 130 aa, Homo sapien [sequence omitted]

SEQ ID NO: 158 - protein, 340 aa, Homo sapien
PGEAHFREDHWPAAGPTRRRSSRPGVPLQGAEEDGALWKGARGFNGVQLFEGMKAFKGKDQQVRLFRPWLNMDRMLRSAMRLCLPSFDKLELLECIRRLIEVDKDWVPDAAGTSLYVRPVLIGNEPSLGVSQPTRALLFVILCPVGAYFPGGSVTPVSLLADPAFIRAWVGGVGNYKLGGNYGPTVLVQQEALKRGCEQVLWLYGPDHQLTEVGTMNIFVYWTHEDGVLELVTPPLNGVILPGVVRQSLLDMAQTWGEFRVVERTITMKQLLRALEEGRVREVFGSGTACQVCPVHRILYKDRNLHIPTMENGPELILRFQKELKEIQYGIRAHEWMFPV

SEQ ID NO: 159 - protein, 306 aa, Homo sapien
MAPFGKEHEALMGELFEGMKAFKGKDQQVRLFRPWLNMDRMLRSAMRLCLPSFDKLELLECIRRLIEVDKDWVPDAAGTSLYVRPVLIGNEPSLGVSQPTRALLFVILCPVGAYFPGGSVTPVSLLADPAFIRAWVGGVGNYKLGGNYGPTVLVQQEALKRGCEQVLWLYGPDHQLTEVGTMNIFVYWTHEDGVLELVTPPLNGVILPGVVRQSLLDMAQTWGEFRVVERTITMKQLLRALEEGRVREVFGSGTACQVCPVHRILYKDRNLHIPTMENGPELILRFQKELKEIQYGIRAHEWMFPV

SEQ ID NO: 160 - protein, 485 aa, Homo sapien
QIVYLYIQRIIRVFHGVNAPDNPLKEEHLVQLNETDILRVLDGNTGGTYGGHIPGSDRAGLNRHDKSENPGRIYAGGSSTAAGDPSLLSAARIMAAAALGQIWARKLLSVPWLLCGPRRYASSSFKAADLQLEMTQKPHKKPGPGEPLVFGKTFTDHMLMVEWNDKGWGQPRIQPFQNLTLHPASSSLHYSLQLFEGMKAFKGKDQQVRLFRPWLNMDRMLRSAMRLCLPSFDKLELLECIRRLIEVDKDWVPDAAGTSLYVRPVLIGNEPSLGVSQPTRALLFVILCPVGAYFPGGSVTPVSLLADPAFIRAWVGGVGNYKLGGNYGPTVLVQQEALKRGCEQVLWLYGPDHQLTEVGTMNIFVYWTHEDGVLELVTPPLNGVILPGVVRQSLLDMAQTWVRTWHLLVMGAMCQGPGHQRAGTGAHWHVSAPSPGSVSPVGPLSFSLSSGRERWRSAAGQPSGDTCLCQLPCRVSSGWWSARSP

SEQ ID NO: 161 - protein, 465 aa, Homo sapien
MAAAALGQIWARKLLSVPWLLCGPRRYASSSFKAADLQLEMTQKPHKKPGPGEPLVFGKTFTDHMLMVEWNDKGWGQPRIQPFQNLTLHPASSSLHYSLQLFEGMKAFKGKDQQVRLFRPWLNMDRMLRSAMRLCLPSFDKLELLECIRRLIEVDKDWVPDAAGTSLYVRPVLIGNEPSLGVSQPTRALLFVILCPVGAYFPGGSVTPVSLLADPAFIRAWVGGVGNYKLGGNYGPTVLVQQEALKRGCEQVLWLYGPDHQLTEVGTMNIFVYWTHEDGVLELVTPPLNGVILPGVVRQSLLDMAQTWVEDMASSGDGRHVPGARASEGWDWGTLACLCPFSWVCLSRWASVFLTILREGEVEVCSRATLWGHVSLPTALQGEFRVVERTITMKQLLRALEEGRVREVFGSGTACQVCPVHRILYKDRNLHIPTMENGPELILRFQKELKEIQYGIRAHEWMFPV

SEQ ID NO: 162 - protein, 74 aa, Homo sapien
  MISC_FEATURE (3)..(5): X=any amino acid
  MISC_FEATURE (8)..(10): X=any amino acid
  MISC_FEATURE (13)..(14): X=any amino acid
TLXXXFNXXXSSXXKIRKNTASYVPKEKKIKGTMPTCSTIKASFSYFFNTKYKQRIHILKTELRSRHAVLETLQ

SEQ ID NO: 163 - protein, 63 aa, Homo sapien
TRVLQCAPRCSPNCVAFTAAVTVPACIYALFGPCEHTGILVILPPMEYLWRSPVFIYFGINPL

SEQ ID NO: 164 - protein, 313 aa, Homo sapien
MKCEHCTRKECSKKTKTDDQENVSADAPSPAQENGEKGEFHKLADAKIFLSDCLACDSCMTAEEGVQLSQQNAKDFFRVLNLNKKCDTSKHKVLVVSVCPQSLPYFAAKFNLSVTDASRRLCGFLKSLGVHYVFDTTIAADFSILESQKEFVRRYRQHSEEERTLPMLTSACPGWVRYAERVLGRPITAHLCTAKSPQQVMGSLVKDYFARQQNLSPEKIFHVIVAPCYDKKLEALQESLPPALHGSRGADCVLTSGEIAQIMEQGDLSVRDAAVDTLVSGFSGESPLGGRTSRQPCQPPARPRAALLYDEAM

SEQ ID NO: 165 - protein, 395 aa, Homo sapien
EPRVRRVSNAELADRARPRPPRAQGPPGPVTTGPSTLERPQLGLGTVRALTDSLVNAAWPPPPPQDPREAETGARTRSPRRRTWSEPAAPPRALRLALGPGPPLPDTVIGLGKAVRVGNPIGPGVRLVLSRCSHWPSAAVGGEAASGEDNKGPRAAGSGVPVSRCFPEAEAPGLPPAALQMKCEHCTRKECSKKTKTDDQENVSADAPSPAQENGEKGEFHKLADAKIFLSDCLACDSCMTAEEGVQLSQQNAKDFFRVLNLNKKCDTSKHKVLVVSVCPQSLPYFAAKFNLSVTDASRRLCGFLKSLGVHYVFDTTIAADFSILESQKEFVRRYRQHSEEERTLPMLTSACPGWVRYAERVLGRPITAHLCTAKSPQQVMGSLVKDYFARQQVS

SEQ ID NO: 166 - protein, 285 aa, Homo sapien
MGSAFPVLPGGSTGWGALQMFGRTTPSPEGGSRQTWMECWCSNLSPEKIFHVIVAPCYDKKLEALQESLPPALHGSRGADCVLTSGEIAQIMEQGDLSVRDAAVDTLFGDLKEDKVTRHDGASSDGHLAHIFRHAAKELFNEDVEEVTYRALRNKDFQEVTLEKNGEVVLRFAAAYGFRNIQNMILKLKKGKFPFHFVEVLACAGGCLNGRGQAQTPDGHADKALLRQMEGIYADIPVRRPESSAHVQELYQEWLEGINSPKAREVLHTTYQSQERGTHSLDIKW

SEQ ID NO: 167 - protein, 170 aa, Homo sapien
DSVSHPAKKFAMSAAKCKQSRLWVKALVMKNKKKKIPKHFLTLVLKKTPSPKVCFSFNFLDFARLSGCKLPTLFWMDRDKVFKQRLCPLHKPFPPPPPQPPAAIITGAVKWLLSDGHTTRRQMKRSGSKRGSASQYQPAVPRGGSAGRTVFPRQAAMPPPTAKAPKATSV

SEQ ID NO: 168 - protein, 159 aa, Homo sapien
MSAAKCKQSRLWVKALVMKNKKKKIPKHFLTLVLKKTPSPKVCFSFNFLDFARLSGCKLPTLFWMDRDKVFKQRLCPLHKPFPPPPPQPPAAIITGAVKWLLSDGHTTRRQMKRSGSKRGSASQYQPAVPRGGSAGRTVFPRQAAMPPPTAKAPKGNIR

SEQ ID NO: 169 - protein, 170 aa, Homo sapien; identical to SEQ ID NO: 167

SEQ ID NO: 170 - protein, 255 aa, Homo sapien
QLLRDPNVALELSAMCSTVPWRRTLREGQPCHLSLPHHHSPPPIKLQSGCWTPLGAVSAHHPLCAATWSQAHCPLAGRGPSRRRCGLHRAPSTKESANASAGPRAMASLPQLMAAPTSSCTSLMWKGSMSQWKATRSPIKCAPSHPRMRSCRPWRSSSLTWHQAPSMRPGLDMSSAPRRWWKHPLSCACGRLCGEEAADTGDDILPHETGLQPGMVPLKYLLEEGVWGAGVGCGVFPAISTAYDHCNNLSPSEEH

SEQ ID NO: 171 - protein, 147 aa, Homo sapien
MSSEPPPPPQPPTHQASVGLLDTPRSRERSPSPLRGNVVPSPLPTRRTRTFSATVRASQGPVYKGVCKCFCRSKGHGFITPADGGPDIFLHISDVEGEYVPVEGDEVTYKMCSIPPKNEKLQAVEVVITHLAPGTKHETWSGHVISS

SEQ ID NO: 172 - protein, 255 aa, Homo sapien; identical to SEQ ID NO: 170

SEQ ID NO: 173 - protein, 243 aa, Homo sapien
LRTGRNSGGGQNGLQGQPCHLSLPHHHSPPPIKLQSGCWTPLGAVSAHHPLCAATWSQAHCPLAGRGPSRRRCGLHRAPSTKESANASAGPRAMASLPQLMAAPTSSCTSLMWKGSMSQWKATRSPIKCAPSHPRMRSCRPWRSSSLTWHQAPSMRPGLDMSSAPRRWWKHPLSCACGRLCGEEAADTGDDILPHETGLQPGMVPLKYLLEEGVWGAGVGCGVFPAISTAYDHCNNLSPSEEH

SEQ ID NO: 174 - protein, 147 aa, Homo sapien; identical to SEQ ID NO: 171

SEQ ID NO: 175 - protein, 202 aa, Homo sapien
WGTAVGRGWNELCVPRSADGAPDISPSLSGRCGLHRAPSTKESANASAGPRAMASLPQLMAAPTSSCTSLMWKGSMSQWKATRSPIKCAPSHPRMRSCRPWRSSSLTWHQAPSMRPGLDMSSAPRRWWKHPLSCACGRLCGEEAADTGDDILPHETGLQPGMVPLKYLLEEGVWGAGVGCGVFPAISTAYDHCNNLSPSEEH

SEQ ID NO: 176 - protein, 138 aa, Homo sapien
MASLPQLMAAPTSSCTSLMWKGSMSQWKATRSPIKCAPSHPRMRSCRPWRSSSLTWHQAPSMRPGLDMSSAPRRWWKHPLSCACGRLCGEEAADTGDDILPHETGLQPGMVPLKYLLEEGVWGGRCGVWGVPGHQHSL

SEQ ID NO: 177 - protein, 185 aa, Homo sapien
MSSEPPPPPQPPTHQASVGLLDTPRSRERSPSPSTKESANASAGPRAMASLPQLMAAPTSSCTSLMWKGSMSQWKATRSPIKCAPSHPRMRSCRPWRSSSLTWHQAPSMRPGLDMSSAPRRWWKHPLSCACGRLCGEEAADTGDDILPHETGLQPGMVPLKYLLEEGVWGGRCGVWGVPGHQHSL

SEQ ID NO: 178 - protein, 265 aa, Homo sapien
SFPPAHLFSACRGSSSRPPRCFCLWAGALDGGLAGRWGEARGASHAGSRATPRRAWPRQLWLEVGTSAMSSEPPPPPQPPTHQASVGLLDTPRSRERSPSPSTKESANASAGPRAMASLPQLMAAPTSSCTSLMWKGSMSQWKATRSPIKCAPSHPRMRSCRPWRSSSLTWHQAPSMRPGLDMSSAPRRWWKHPLSCACGRLCGEEAADTGDDILPHETGLQPGMVPLKYLLEEGVWGAGVGCGVFPAISTAYDHCNNLSPSEEH

SEQ ID NO: 179 - protein, 201 aa, Homo sapien
MCSTVPWRRTLREGQFLPLLPCGVWLPAASGRVRGVAEFGSRWLALKSPWLWVFFFETESCSVAQAGVQWCDLSSLEPPPPRFKQFSCLSLQVDGITGACHHAQLIFVFVLETGFPHVGQASLELLTLSDPPASASQSAGIAGVSHCARPLALGFLLTFLLPSHKYYVSQMCRDPCLVLGTQRGPMPSWSWGRMWHFHEEL

SEQ ID NO: 180 - protein, 159 aa, Homo sapien [sequence omitted]

SEQ ID NO: 181 - protein, 128 aa, Homo sapien
MRIHDFHILKQNTTKNREAEIEKAVGDTRHPFKTRMYCIVITLNTTIFITLTLFSPSRKTNDDTIDFDYTVLLHELSTQEIIPCRIHLVWYPGKPLKVKYHCQELQTPEEASGTEEGSAVVPTELSNF

SEQ ID NO: 182 - protein, 224 aa, Homo sapien
MDGDQTEERMMKMMVHQRPLPQPALLPMSSNTFPSRSTKPSPMNPLPSSHMPGAFSESNSSFPQSASLPPYFSQGPSNRPPIRAEGRNFPLPLPNKPRPPSPAEEENSLNEEWYVSYITRPEAEAALRKINQDGTFLVRDSSKKTTTNPYVLMVLYKDKVYNIQIRYQKESQVYLLGTGLRGKEDFLSVSDIIDYFRKMPLLLIDGKNRGSRYQCTLTHAAGYP

SEQ ID NO: 183 - protein, 230 aa, Homo sapien [sequence omitted]

SEQ ID NO: 184 - protein, 225 aa, Homo sapien
QLGPANLIHCFLLLHVHQRPLPQPALLPMSSNTFPSRSTKPSPMNPLPSSHMPGAFSESNSSFPQSASLPPYFSQGPSNRPPIRAEGRNFPLPLPNKPRPPSPAEEENSLNEEWYVSYITRPEAEAALRKINQDGTFLVRDSSKKTTTNPYVLMVLYKDKVYNIQIRYQKESQVYLLGTGLRGKEDFLSVSDIIDYFRKMPLLLIDGKNRGSRYQCTLTHAAGYP

SEQ ID NO: 185 - protein, 1085 aa, Homo sapien
MAASTGYVRLWGAARCWVLRRPMLAAAGGRVPTAAGAWLLRGQRTCDASPPWALWGRGPAIGGQWRGFWEASSRGGGAFSGGEDASEGGAEEGAGGAGGSAGAGEGPVITALTPMTIPDVFPHLPLIAITRNPVFPRFIKIIEVKNKKLVELLRRKVRLAQPYVGVFLKRDDSNESDVVESLDEIYHTGTFAQIHEMQDLGDKLRMIVMGHRRVHISRQLEVEPEEPEAENKHKPRRKSKRGKKEAEDELSARHPAELAMEPTPELPAEVLMVEVENVVHEDFQVTEEVKALTAEIVKTIRDIIALNPLYRESVLQMMQAGQRVVDNPIYLSDMGAALTGAESHELQDVLEETNIPKRLYKALSLLKKEFELSKLQQRLGREVEEKIKQTHRKYLLQEQLKIIKKELGLEKDDKDAIEEKFRERLKELVVPKHVMDVVDEELSKLGLLDNHSSEFNVTRNYLDWLTSIPWGKYSNENLDLARAQAVLEEDHYGMEDVKKRILEFIAVSQLRGSTQGKILCFYGPPGVGKTSIARSIARALNREYFRFSVGGMTDVAEIKGHRRTYVGAMPGKIIQCLKKTKTENPLILIDEVRAERPGDPLTRQCRVQDEAEAFRVLGSPSQLRGHRRDAGPDGTDGSLPTHSHAQQAARPRQGVGAALTRGLPSPDPGVSPLGGLARGTARGTTCCLLPQVDKIGRGYQGDPSSALLELLDPEQNANFLDHYLDVPVDLSKVGGLSGAWACWGGYAASPPAPCRRPQVLFICTANVTDTIPEPLRDRMEMINVSGYVAQEKLAIAERYLVPQARALCGLDESKAKLSSDVLTLLIKQYCRESGVRNLQKQVEKVLRKSAYKIVSGEAESVEVTPENLQDFVGKPVFTVERMYDVTPPGVVMGLAWTAMGGSTLFVETSLRRPQDKDAKGDKDGSLEVTGQLGEVMKESARIAYTFARAFLMQHAPANDYLVTSHIHLHVPEGATPKDGPSAGCTIVTALLSLAMGRPVRQNLAMTGEVSLTGKILPVGGIKEKTIAAKRAGVTCIVLPAENKKDFYDLAAFITEGLEVHFVEHYREIFDIAFPDEQAEALAVER

SEQ ID NO: 186 - protein, 668 aa, Homo sapien
NSAPSSPRRPSSLKRLFRATRPSGTEARAGRHVRFAASGNDASCVSRQYGRAMAASTGYVRLWGAARCWVLRRPMLAAAGGRVPTAAGAWLLRGQRTCDASPPWALWGRGPAIGGQWRGFWEASSRGGGAFSGGEDASEGGAEEGAGGAGGSAGAGEGPVITALTPMTIPDVFPHLPLIAITRNPVFPRFIKIIEVKNKKLVELLRRKVRLAQPYVGVFLKRDDSNESDVVESLDEIYHTGTFAQIHEMQDLGDKLRMIVMGHRRVHISRQLEVEPEEPEAENKHKPRRKSKRGKKEAEDELSARHPAELAMEPTPELPAEVLMVEVENVVHEDFQVTEEVKALTAEIVKTIRDIIALNPLYRESVLQMMQAGQRVVDNPIYLSDMGAALTGAESHELQDVLEETNIPKRLYKALSLLKKEFELSKLQQRLGREVEEKIKQTHRKYLLQEQLKIIKKELGLEKDDKDAIEEKFRERLKELVVPKHVMDVVDEELSKLGLLDNHSSEFNVTRNYLDWLTSIPWGKYSNENLDLARAQAVLEEDHYGMEDVKKRILEFIAVSQLRGSTQGKILCFYGPPGVGKTSIARSIARALNREYFRFSVGGMTDVAEIKGHRRTYVGAMPGKIIQCLKKTKTENPLILIDEVRAERPGDPLTRQCRVQDEAEPSGS

SEQ ID NO: 187 - protein, 771 aa, Homo sapien
MEERKHSLFFSPEIAYPKDKALRGKETGFGFSFDSLGPVSLGLVSPPGTALLHLPGRPWPGPVGGGEGVDGAGGWGSQGHAPTQPTPCWSTAGPQRPCPILGALTAEIVKTIRDIIALNPLYRESVLQMMQAGQRVVDNPIYLSDMGAALTGAESHELQDVLEETNIPKRLYKALSLLKKEFELSKLQQRLGREVEEKIKQTHRKYLLQEQLKIIKKELGLEKDDKDAIEEKFRERLKELVVPKHVMDVVDEELSKLGLLDNHSSEFNVTRNYLDWLTSIPWGKYSNENLDLARAQAVLEEDHYGMEDVKKRILEFIAVSQLRGSTQGKILCFYGPPGVGKTSIARSIARALNREYFRFSVGGMTDVAEIKGHRRTYVGAMPGKIIQCLKKTKTENPLILIDEVDKIGRGYQGDPSSALLELLDPEQNANFLDHYLDVPVDLSKVLFICTANVTDTIPEPLRDRMEMINVSGYVAQEKLAIAERYLVPQARALCGLDESKAKLSSDVLTLLIKQYCRESGVRNLQKQVEKVLRKSAYKIVSGEAESVEVTPENLQDFVGKPVFTVERMYDVTPPGVVMGLAWTAMGGSTLFVETSLRRPQDKDAKGDKDGSLEVTGQLGEVMKESARIAYTFARAFLMQHAPANDYLVTSHIHLHVPEGATPKDGPSAGCTIVTALLSLAMGRPVRQNLAMTGEVSLTGKILPVGGIKEKTIAAKRAGVTCIVLPAENKKDFYDLAAFITEGLEVHFVEHYREIFDIAFPDEQAEALAVER

SEQ ID NO: 188 - protein, 848 aa, Homo sapien
MAASTGYVRLWGAARCWVLRRPMLAAAGGRVPTAAGAWLLRGQRTCDASPPWALWGRGPAIGGQWRGFWEASSRGGGAFSGGEDASEGGAEEGAGGAGGSAGAGEGPVITALTPMTIPDVFPHLPLIAITRNPVFPRFIKIIEVKNKKLVELLRRKVRLAQPYVGVFLKRDDSNESDVVESLDEIYHTGTFAQIHEMQDLGDKLRMIVMGHRRVHISRQLEVEPEEPEAENKHKPRRKSKRGKKEAEDELSARHPAELAMEPTPELPAEVLMVEVENVVHEDFQVTEEVKALTAEIVKTIRDIIALNPLYRESVLQMMQAGQRVVDNPIYLSDMGAALTGAESHELQDVLEETNIPKRLYKALSLLKKEFELSKLQQRLGREVEEKIKQTHRKYLLQEQLKIIKKELGLEKDDKDAIEEKFRERLKELVVPKHVMDVVDEELSKLGLLDNHSSEFNVTRNYLDWLTSIPWGKYSNENLDLARAQAVLEEDHYGMEDVKKRILEFIAVSQLRGSTQGKILCFYGPPGVGKTSIARSIARALNREYFRFSVGGMTDVAEIKGHRRTYVGAMPGKIIQCLKKTKTENPLILIDEVDKIGRGYQGDPSSALLELLDPEQNANFLDHYLDVPVDLSKVLFICTANVTDTIPEPLRDRMEMINVSGYVAQEKLAIAERYLVPQARALCGLDESKAKLSSDVLTLLIKQYCRESGVRNLQKQVEKVLRKSAYKIVSGEAESVEVTPENLQDFVGKPVFTVERMYDVTPPGVVMGLAWTAMGERGGGRRPQSHSHFYPRTSRSHLVHLCSGPQVALNGLWRGVVCWEPRGSGLREGKAVTHGGGSTPWALWIWVPL

SEQ ID NO: 189 - protein, 124 aa, Homo sapien
MVFLHVGQAGLELPTSGDPPTSASQSAGMTELELGPSPRLQPIRRHPKELPQYGGPGKDIFEDQLYLPVHSDGISVHQMFTMATAEHRSNSSIAGKMLTKVEKNHEKEKSQHLEGSASSSLSSD

SEQ ID NO: 190 - protein, 296 aa, Homo sapien
MSTERTSWTSLSTIQKIALGLGIPASATVAYILYRRYRESREERLTFVGEDDIEIEMRVPQEAVKLIIGRQGANIKQLRKQTGARIDVDTEDVGDERVLLISGFPVQVCKAKAAIHQILTENTPVSEQLSVPQRSVGRIIGRGGETIRSICKASGAKITCDKESEGTLLLSRLIKISGTQKEVAAAKHLILEKVSEDEELRKRIAHSAETRVPRKQPISVRREDMTEPGGAGEPALWKNTSSSMEPTAPLVTPPPKGGGDMAVVVSKEGSWEKPSDDSFQKSEAQAIPEMPMFESM

SEQ ID NO: 191 - protein, 195 aa, Homo sapien
ARYEAWGESAEAHVLEGPDTNTTIIQLQPLQEPESWARTQSGLQSYLLQFHGLVRLVHQERTLAFPLTIRCFLGCELPPEGSRAHVFFEVAVNGSSFVSFRPERALWQADTQVTSGVVTFTLQQLNAYNRTRYELREFLEDTCVQYVQKHISAENTKGSQTSRSYTSLVLGVLVGSFIIAGVAVGIFLCTGGRRC

SEQ ID NO: 192 - protein, 194 aa, Homo sapien
  MISC_FEATURE (6)..(7): X=any amino acid
LGTGRXXSAEAHVLEGPDTNTTIIQLQPLQEPESWARTQSGLQSYLLQFHGLVRLVHQERTLAFPLTIRCFLGCELPPEGSRAHVFFEVAVNGSSFVSFRPERALWQADTQVTSGVVTFTLQQLNAYNRTRYELREFLEDTCVQYVQKHISAENTKGSQTSRSYTSLVLGVLVGSFIIAGVAVGIFLCTGGRRC

SEQ ID NO: 193 - protein, 132 aa, Homo sapien
MNYTQRELQMAAPTHLNHTVVGTPCGNQTLATTRRKHLAWRERRPAHTTPARARDGNPNIGVGAADKPPSLLNHARRSSLPNRPPRSTGGDESLITHNPSYSHGRRAILHACVVPHHTERRVASIICRPGPR

SEQ ID NO: 194 - protein, 199 aa, Homo sapien
IITIKLFKKKKKKQTKNIKTKKQKEKKKKQNRGAGAPQKKSRPRGAAPITARPPGFLVSTQQGGAPHKNERAHRSHNYTQRELRWPRPHTSTTQSWVHPAATKRWPQPGGNILRGEKGDPLTLPQRERGTATQTSVWGPPTNLPHSSTMRDDLHYQIAPLARRAATNRSSHTIHLIHTAVALSSTRVWCLITPNDGSHQ

SEQ ID NO: 195 - protein, 259 aa, Homo sapien
MEGRRQARRLRQLAGAGAQGGSPIVEAAENCHGAASVQRASLIYSGRVCIWGGVQGADKDRRAPGAAAGGAKTGTRMSAPQRPWALAAGARRTPREAGISKAVRPEARPRLRTKTELEDLQKKPPPYLRNLSSDDANVLVWHALLLPDQPPYHLKAFNLRISFPPEYPFKPPMIKFTTKIYHPNVDENGQICLPIISSENWKPCTKTCQVLEALNVLVNRPNIREPLRMDLADLLTQNPELFRKNAEEFTLRFGVDRPS

SEQ ID NO: 196 - protein, 156 aa, Homo sapien
MRRWTWKASWSSELEDLQKKPPPYLRNLSSDDANVLVWHALLLPDQPPYHLKAFNLRISFPPEYPFKPPMIKFTTKIYHPNVDENGQICLPIISSENWKPCTKTCQVLEALNVLVNRPNIREPLRMDLADLLTQNPELFRKNAEEFTLRFGVDRPS

SEQ ID NO: 197 - protein, 168 aa, Homo sapien
NLGQSSLSILWRKRCGGGPGRPPGELEDLQKKPPPYLRNLSSDDANVLVWHALLLPDQPPYHLKAFNLRISFPPEYPFKPPMIKFTTKIYHPNVDENGQICLPIISSENWKPCTKTCQVLEALNVLVNRPNIREPLRMDLADLLTQNPELFRKNAEEFTLRFGVDRPS

SEQ ID NO: 198 - protein, 137 aa, Homo sapien
MEGRRQGNLSSDDANVLVWHALLLPDQPPYHLKAFNLRISFPPEYPFKPPMIKFTTKIYHPNVDENGQICLPIISSENWKPCTKTCQVLEALNVLVNRPNIREPLRMDLADLLTQNPELFRKNAEEFTLRFGVDRPS

SEQ ID NO: 199 - protein, 237 aa, Homo sapien
MMASMRVVKELEDLQKKPPPYLRNLSSDDANVLVWHALLLPEAEVAVSRDHAIALQPGQQSETPSQKKKKKEAWHQHLLLMRPSGSFHSWWKAKGSHVYRSHAREEVKERESEQVPGSSKQPAFSDQPPYHLKAFNLRISFPPEYPFKPPMIKFTTKIYHPNVDENGQICLPIISSENWKPCTKTCQVLEALNVLVNRPNIREPLRMDLADLLTQNPELFRKNAEEFTLRFGVDRPS

SEQ ID NO: 200 - protein, 156 aa, Homo sapien
GPQEASTHGGRQRGATCTDHIAREEVKERESEQVPGSSKQPAFSDQPPYHLKAFNLRISFPPEYPFKPPMIKFTTKIYHPNVDENGQICLPIISSENWKPCTKTCQVLEALNVLVNRPNIREPLRMDLADLLTQNPELFRKNAEEFTLRFGVDRPS

SEQ ID NO: 201 - protein, 88 aa, Homo sapien
MVQAGPSSCSISGDPGLPRRWRPAQVVRPGRLRIRGWSRRIPKAEVGSPGDSQLLSLWRRGPVTEAPFSNPGAAFQRLNFSNHCFNSF

SEQ ID NO: 202 - protein, 40 aa, Homo sapien
MEKGVGGQPRGRRRIYNIFFRHRCYRKMCERSGCAARTGA

SEQ ID NO: 203 - protein, 60 aa, Homo sapien
GPEKWRRGWGDSHVAAGGFTTFSFAIDVIAKCVREAAAQPGREREGAGQRFPPTGNLMGL

SEQ ID NO: 204 - protein, 213 aa, Homo sapien
  MISC_FEATURE (5)..(5): X=any amino acid
MPQNXGVIGLRHHFAIHYPAGGGLWDGLHGVAAVQGITKIKVLAIYSFCSQICDPRTTGAFWQTWKDFEVRHGNEDTIKEMLRIRRSVQATYNTQVNFMASQMLKVSGSATGTVSDLAPGQSGMDDMKLLEQRAEQLAAEAERDQPLRAQSKILFVRSDASREELAELAQQVNPEEIQLGEDEDEDEMDLEPNEVRLEQQSVPAAVFGSLKED

SEQ ID NO: 205 - protein, 458 aa, Homo sapien
MIDHYRGMGPLMLLERRSVMDRGRGRYQYSPQNQHVEQQPHYTHKPTLEYSPFPIPPQSPAYEPNLFDGPESQFCPNQSLVSLLGDQRESENIANPMQTSSSVQQQNDAHLHSFSMMPSSACEAMVGHEMASDSSNTSLPFSNMGNPMNTTQLGKSLFQWQVEQEESKLANISQDQFLSKDADGDTFLHIAVAQGRRALSYVLARKMNALHMLDIKEHNGQSAFQVAVAANQHLIVQDLVNIGAQVNTTDCWGRTPLHVCAEKGHSQVLQAIQKGAVGSNQFVDLEATNYDGLTPLHCAVIAHNAVVHELQRNQQPHSPEVQELLLKNKSLVDTIKCLIQMGAAVEAKDRKSGRTALHLAAEEANLELIRLFLELPSCLSFVNAKAYNGNTALHVAASLQYRLTQLDAVRLLMRKGADPSTRNLENEQPVHLVPDGPVGEQIRRILKGKSIQQRAPPY

SEQ ID NO: 206 - protein, 439 aa, Homo sapien
WIVVAARYQYSPQNQHVEQQPHYTHKPTLEYSPFPIPPQSPAYEPNLFDGPESQFCPNQSLVSLLGDQRESENIANPMQTSSSVQQQNDAHLHSFSMMPSSACEAMVGHEMASDSSNTSLPFSNMGNPMNTTQLGKSLFQWQVEQEESKLANISQDQFLSKDADGDTFLHIAVAQGRRALSYVLARKMNALHMLDIKEHNGQSAFQVAVAANQHLIVQDLVNIGAQVNTTDCWGRTPLHVCAEKGHSQVLQAIQKGAVGSNQFVDLEATNYDGLTPLHCAVIAHNAVVHELQRNQQPHSPEVQELLLKNKSLVDTIKCLIQMGAAVEAKDRKSGRTALHLAAEEANLELIRLFLELPSCLSFVNAKAYNGNTALHVAASLQYRLTQLDAVRLLMRKGADPSTRNLENEQPVHLVPDGPVGEQIRRILKGKSIQQRAPPY

SEQ ID NO: 207 - protein, 130 aa, Homo sapien
MQPLWLCWALWVLPLASPGAALTGEQLLGSLLRQLQLKEVPTLDRADMEELVIPTHVRAQYVALLQRSHGDRSRGKRFSQSFREVAGRFLALEASTHLLVFGMEQRLPPNSELVQAVLRLFQECTLTCRG

SEQ ID NO: 208 - protein, 243 aa, Homo sapien
DPPAAFSRDSPTLPLAPPGQHHAAPVALLGTLGVAPGQPRGRPDRGAAPGQPAAAAAAQRGAHPGQGRHGGAGHPHPREGPVRGPAAAQPRGPLPRKEVQPELPRGGRQVPGVGGQHTPAGVRHGAAAAAQQRAGAGRAAALPGMYIDLQGMKWAENWVLEPPGFLAYECVGTCRQPPEALAFKWPFLGPRQCIASETDSLPMIVSIKEGGRTRPQVVSLPNMRVQKCSCASDGALVPRRLQP

SEQ ID NO: 209 - protein, 204 aa, Homo sapien
MERLTLPLGGAAAVDEYLEYRRYKQHKTDLEAIPQQCPIDLPCQVTGCQCRAYLYVPLNGSQPIRCRCKHFADQHSAAPGFTCNTCSKCSGFHSCFTCACGQPAYAHDTVVETKQERLAQEKPVGQDIPYAAMGGLTGFSSLAEGYMRLDDSGIVGTSSQVSSLRRPEEDDMAFFERRYQERMKMEKAAKWKGKAPLPSATKPS

SEQ ID NO: 210 - protein, 80 aa, Homo sapien
EVQEAIFFRVCGARSVVLLLVAVRLHTLLSCPLEQPAGTEWILEEGVTTGPPRKPRADIYNLRSPDEFIVGQNQALIEPG

SEQ ID NO: 211 - protein, 84 aa, Homo sapien
EQQPSPIDSTETTRNQQVRPTTSRNKRRAASQHISKATRPTAKRQAADSDITTSGPTATTTDDKNDVCEDTPHRRTTGWHQRDL

SEQ ID NO: 212 - protein, 56 aa, Homo sapien
PLWRRLLLGSRLLLPCNRNWRWNMRGALWKEKDRPCAFMKVKIWLNQFHKVTVYIA

SEQ ID NO: 213 - protein, 451 aa, Homo sapien
MFLLLLHLQIKWRATINLLSVTEDGLHFVEYYLNRIIHLDVDSEAKKLLGLGQKHLVMGDIPAAVNAFQEAASLLGKKYGETANECGEAFFFYGKSLLELARMENGVLGNALEGVHVEEEEGEKTEDESLVENNDNIDETEGSEEDDKENDKTEEMPNDSVLENKSLQENEEEEIGNLELAWDMLDLAKIIFKRQETKEAQLYAAQAHLKLGEVSVESENYVQAVEEFQSCLNLQEQYLEAHDRLLAETHYQLGLAYGYNSQYDEAVAQFSKSIEVIENRMAVLNEQVKEAEGSSAEYKKEIEELKELLPEIREKIEDAKESQRSGNVAELALKATLVESSTSGFTPGGGGSSVSMIASRKPTDGASSSNCVTDISHLVRKKRKPEEESPRKDDAKKAKQEPEVNGGSGDAVPSGNEVSENMEEEAENQAESRAAVEGTVEAGATVESTAC

SEQ ID NO: 214 - protein, 337 aa, Homo sapien
MAHAPARCPSARGSGDGEMGKPRNVALITGITGQDGSYLAEFLLEKGYEVHGIVRRSSSFNTGRIEHLYKNPQAHIEGNMKLHYGDLTDSTCLVKIINEVKPTEIYNLGAQSHVKISFDLAEYTADVDGVGTLRLLDAVKTCGLINSVKFYQASTSELYGKVQEIPQKETTPFYPRSPYGANFVTRKISRSVAKIYLGQLECFSLGNLDAKRDWGHAKDYVEAMWLMLQNDEPEDFVIATGEVHSVREFVEKSFLHIGKTIVWEGKNENEVGRCKETGKVHVTVDLKYYRPTEVDFLQGDCTKAKQKLNWKPRVAFDELVREMVHADVELMRTNPNA

SEQ ID NO: 215 - protein, 332 aa, Homo sapien
MAHAPARCPSARGSGDGEMGKPRNVALITGITGQDGSYLAEFLLEKGYEVHGIVRRSSSFNTGRIEHLYKNPQAHIEGNMKLHYGDLTDSTCLVKIINEVKPTEIYNLGAQSHVKISFDLAEYTADVDGVGTLRLLDAVKTCGLINSVKFYQASTSELYGKVQEIPQKETTPFYPRSPYGAAKLYAYWIVVNFREAYNLFAVNGILFNHESPRRGANFVTRKISRSVAKIYLGQLECFSLGNLDAKRDWGHAKDYVEAMWLMLQNDEPEDFVIATGEVHSVREFVEKSFLHIGKTIVWEGKNENEVGRCKETGKVHVTVDLKYYRPTEVETN

SEQ ID NO: 216 - protein, 382 aa, Homo sapien
MAHAPARCPSARGSGDGEMGKPRNVALITGITGQDGSYLAEFLLEKGYEVHGIVRRSSSFNTGRIEHLYKNPQAHIEGNMKLHYGDLTDSTCLVKIINEVKPTEIYNLGAQSHVKISFDLAEYTADVDGVGTLRLLDAVKTCGLINSVKFYQASTSELYGKVQEIPQKETTPFYPRSPYGAAKLYAYWIVVNFREAYNLFAVNGILFNHESPRRGANFVTRKISRSVAKIYLGQLECFSLGNLDAKRDWGHAKDYVEAMWLMLQNDEPEDFVIATGEVHSVREFVEKSFLHIGKTIVWEGKNENEVGRCKETGKVHVTVDLKYYRPTEVVRTLWPPSAWPRLAGWLGKCAHGMPGASLWSCQFSSLASFSVHFQNQNTVNSI

SEQ ID NO: 217 - protein, 258 aa, Homo sapien
MNSNVENLPPHIIRLVYKEVTTLTADPPDGIKVFPNEEDLTDLQVTIEGPEGTPYAGGLFRMKLLLGKDFPASPPKGYFLTKIFHPNVGANGEICVNVLKRDWTAELGIRHVLLTIKCLLIHPNPESALNEEAGRLLLENYEEYAARARLLTEIHGGAGGPSGRAEAGRALASGTEASSTDPGAPGRRAEVHWPEHVGRERRWGRKTTDGARVKVFLSRDHSAPNFSNCGPSGRRVNAQTKKPSRKGVLSAAFQASLL

SEQ ID NO: 218 - protein, 262 aa, Homo sapien
MRAVIKRQWCARGRLSAAGHRGGGLVYAVRGGRRRQRGAERGRRGLSRAAAAAVGPPAPAGGPKNLPPHIIRLVYKEVTTLTADPPDGIKVFPNEEDLTDLQVTIEGPEGTPYAGGLFRMKLLLGKDFPASPPKGYFLTKIFHPNVGANGEICVNVLKRDWTAELGIRHVLLTIKCLLIHPNPESALNEEAGRLLLENYEEYAARARLLTEIHGGAGGPSGRAEAGRALASGTEASSTDPGAPGGPGGAEGSHGQEACWRAR

SEQ ID NO: 219 - protein, 291 aa, Homo sapien
GSELRGRGGRGLRAVIKRQWCARGRLSAAGHRGGGLVYAVRGGRRRQRGAERGRRGLSRAAAAAVGPPAPAGGPKNLPPHIIRLVYKEVTTLTADPPDGIKVFPNEEDLTDLQVTIEGPEGTPYAGGLFRMKLLLGKDFPASPPKGYFLTKIFHPNVGANGEICVNVLKRDWTAELGIRHVLLTIKCLLIHPNPESALNEEAGRLLLENYEEYAARARLLTEIHGGAGGPSGRAEAGRALASGTEASSTDPGAPGGPGGAEGPMAKKHAGERDKKLAAKKKTDKKRALRRL

SEQ ID NO: 220 - protein, 233 aa, Homo sapien
MNSNVENLPPHIIRLVYKEVTTLTADPPDGIKVFPNEEDLTDLQVTIEGPEGTPYAGGLFRMKLLLGKDFPASPPKGYFLTKIFHPNVGANGEICVNVLKRDWTAELGIRHVLLLSWKDKQCQTQDTQVLLRSAQEHLTMQRVTIKCLLIHPNPESALNEEAGRLLLENYEEYAARARLLTEIHGGAGGPSGRAEAGRALASGTEASSTDPGAPGGPGGAEGSHGQEACWRAR

SEQ ID NO: 221 - protein, 390 aa, Homo sapien
EPSRPPRAPIGRPATQPSPPLPSLLTIVCGEGSERVENQGTCALTSRLRLGAEGPRRAWPAGGYKEAVVRARPAQCCRAPGRRVGLRCARRTSEAAGSGAGPPGPLQGRSGSSWAPRPGRRTEERRKGAGGTRPRPAAAMNSNVENLPPHIIRLVYKEVTTLTADPPDGIKVFPNEEDLTDLQVTIEGPEGTPYAGGLFRMKLLLGKDFPASPPKGYFLTKIFHPNVGANGEICVNVLKRDWTAELGIRHVLLLSWKDKQCQTQDTQVLLRSAQEHLTMQRVTIKCLLIHPNPESALNEEAGRLLLENYEEYAARARLLTEIHGGAGGPSGRAEAGRALASGTEASSTDPGAPGGPGGAEGPMAKKHAGERDKKLAAKKKTDKKRALRRL

SEQ ID NO: 222 - protein, 110 aa, Homo sapien
PGAHPSLDLTRCSLFLPKRARSAITKISLVLYFLTRRRRTGWRCSPAAWRCQRSEGLQEGLKLPAQNLRMEPALHYLRSQGLGRWRKVISPSLKSYFLNVAPHQALYLTS

SEQ ID NO: 223 - protein, 257 aa, Homo sapien
MDHRSRLRGTGLNRIPGTQSRAPRVPLPFHVQQEAREGEDWEREPPRQRPPIYEPPESEELPDNVMVSKPAPYWEGTAVIDGEFKELKLTDYRGKYLVFFFYPLDFTFVCPTEIIAFGDRLEEFRSINTEVVACSVDSQFTHLAWINTPRRQGGLGPIRIPLLSDLTHQISKDYGVYLEDSGHTLRGLFIIDDKGILRQITLNDLPVGRSVDETLRLVQAFQYTDKHGEVCPAGWKPGSETIIPDPAGKLKYFDKLN

SEQ ID NO: 224 - protein, 105 aa, Homo sapien
MQKKKNSNSNSGTSSFGKRRNKTHTLCRRCGSKAYHLQKSTCGKCGYPAKRKRKYNWSAKAKRRNTTGTGRMRHLKIVYRRFRHGFREGTTPKPKRAAVAASSSS

SEQ ID NO: 225 - protein, 111 aa, Homo sapien
IFMVGVDAKKKEFEFEFGTSSFGKRRNKTHTLCRRCGSKAYHLQKSTCGKCGYPAKRKRKYNWSAKAKRRNTTGTGRMRHLKIVYRRFRHGFREGTTPKPKRAAVAASSSS

SEQ ID NO: 226 - protein, 104 aa, Homo sapien
  MISC_FEATURE (3)..(5): X=any amino acid
MSXXXRIRPRGTSSFGKRRNKTHTLCRRCGSKAYHLQKSTCGKCGYPAKRKRKYNWSAKAKRRNTTGTGRMRHLKIVYRRFRHGFREGTTPKPKRAAVAASSSS

SEQ ID NO: 227 - protein, 129 aa, Homo sapien
  MISC_FEATURE (12)..(12): X=any amino acid
  MISC_FEATURE (25)..(25): X=any amino acid
  MISC_FEATURE (62)..(62): X=any amino acid
  MISC_FEATURE (64)..(64): X=any amino acid
QSHKTLVLQTTXRSLLAHTTCRFWXFPNLLGIKVNNSITRGSGQPSFVRGCIVGKPTSVCQXLXEFGRGERHRLESVAIRRTRCAAAVALRPTTFRSRPVANVATLPSARESITGVPRLKDEIPPELVE

SEQ ID NO: 228 - protein, 96 aa, Homo sapien
ACRAAQCDGSWSRPRSLCRRCGSKAYHLQKSTCGKCGYPAKRKRKYNWSAKAKRRNTTGTGRMRHLKIVYRRFRHGFREGTTPKPKRAAVAASSSS

SEQ ID NO: 229 - protein, 55 aa, Homo sapien
MHAERRSVMDRGRGRGRPTTFRSRPVANVATLPSARESITGVPRLKDEIPPELVE

SEQ ID NO: 230 - protein, 72 aa, Homo sapien
AYHLQKSTCGKCGYPAKRKRKYNWSAKAKRRNTTGTGRMRHLKIVYRRFRHGFREGTTPKPKRAAVAASSSS

SEQ ID NO: 231 - protein, 185 aa, Homo sapien
MLERRSVDGCARAGGRAGGAIMGVDIRHNKDRKVRRKEPKSQDIYLRLLVKLYRFLARRTNSTFNQVVLKRLFMSRTNRPPLSLSRMIRKMKLPGRENKTAVVVGTITDDVRVQEVPKLKVCALRVTSRARSRILRAGGKILTFDQLALDSPKGCGTVLLSGPRKGREVYRHFGKAPGTPHSHTK

SEQ ID NO: 232 - protein, 214 aa, Homo sapien
GLWHCPALRSSQGPRGVPAFRQGPRNPAQPHQVSIRPPALPSPQTQPAGPGLATLGLLLLSLVPASPRPSGTLSCLILPAFPFNTAWSCVFQGLSRHLLGSMQFTGLCQPRLGPSRWWGRCFHSPSWLLGFPLCQAFPAALTLLGLNVTGLWCSCATPQWPPLRGPPSHSLLSPQTLRPLQGPEVRACQRPTGQPRLQKLTLDPTLLLKRFLLT

SEQ ID NO: 233 - protein, 131 aa, Homo sapien
MLERRSVDGCARAGGRAGGAIMGVDIRHNKDRKVRRKEPKSQDIYLRLLVKLYRFLARRTNSTFNQVVLKRLFMSRTNRPPLSLSRMIRKMKLPGRENKTAVVVGTITDDVRVQEVPKLIGRDHAKPDSST

SEQ ID NO: 234 - protein, 132 aa, Homo sapien
DACSSGAGDGCARAGGRAGGAIMGVDIRHNKDRKVRRKEPKSQDIYLRLLVKLYRFLARRTNSTFNQVVLKRLFMSRTNRPPLSLSRMIRKMKLPGRENKTAVVVGTITDDVRVQEVPKLIGRDHAKPDSST

SEQ ID NO: 235 - protein, 195 aa, Homo sapien
MDWSRRGGRAGGAIMGVDIRHNKDRKVRRKEPKSQDIYLRLLVKLYRFLARRTNSTFNQVVLKRLFMSRTNRPPLSLSRMVSGWSREHGRPGSRWVLSVWKGGRTWSSGSNQGIKGLSQPVASVELGLLVGTECPWAVGKSPGPPLLLFVRWRCPGGFRRLPQVITEFYVKGSAEGGPIEQSAFFFLSGAFPSWT

SEQ ID NO: 236 - protein, 115 aa, Homo sapien
SAWTLTSNGRSFPGPFPKSWACFLLPLAILCPCGCSPTLRAVPDLSCYFPKPETAPLQILAAPFPCVQYRVITCPSLVPLILPCDYSVIPLPVPEPPGLFLGSPECSPRTQSAVP

SEQ ID NO: 237 - protein, 156 aa, Homo sapien
QSLGRGLATTRGRGSDGNGPTGNGDHPNFSLSEGRAFGSLAAQPITSCLSVPAPPFSLGKLQDGLLHITTCSFVAPWNSLSLAQRRGFTKTYTVGCEECTVFPCLSIPCKLQSGTHCLWTDQLLQGSEKGFQSRHLACLPREPGLCTWQSLRSQIA

SEQ ID NO: 238 - protein, 226 aa, Homo sapien
MAAAAAAAGAAGSAAPAAAAGAPGSGGAPSGSQGVLIGDRLYSGVLITLENCLLPDDKLRFTPSMSSGLDTDTETDLRVVGCELIQAAGILLRLPQVAMATGQVLFQRFFYTKSFVKHSMEHVSMACVHLASKIEEAPRRIRDVINVFHRLRQLRDKKKPVPLLLDQDYVNLKNQIIKAERRVLKELGFCVHVKHPHKIIVMYLQVLECERNQHLVQTSWVASEGK

SEQ ID NO: 239 - protein, 253 aa, Homo sapien
DSQDCLALSPSNRLLRGVVRLSRFSLDNAGGRPGFPGGALQFFLCLASRNYMNDSLRTDVFVRFQPESIACACIYLAARTLEIPLPNRPHWFLLFGATEEEIQEICLKILQLYARKKVDLTHLEGEVEKRKHAIEEAKAQARGLLPGGTQVLDGTSGFSPAPKLVESPKEGKGSKPSPLSVKNTKRRLEGAKKAKADSPVNGLPKGRESRSRSRSREQSYSRSPSRSASPKRRKSDSGSTSGGSKSQRSLQRL

SEQ ID NO: 240 - protein, 346 aa, Homo sapien
DSQDCLALSPSNRLLRGVVRLSRFSLDNAGGRPGFPGGALQFFLCLASRNYMNDSLRTDVFVRFQPESIACACIYLAARTLEIPLPNRPHWFLLFGATEEEIQEICLKILQLYARKKVDLTHLEGEVEKRKHAIEEAKAQARGLLPGGTQVLDGTSGFSPAPKLVESPKEGKGSKPSPLSVKNTKRRLEGAKKAKADSPVNGLPKGRESRSRSRSREQSYSRSPSRSASPKRRKSDSGSTSGGSKSQSRSRSRSDSPPRQAPRSAPYKGSEIRGSRKSKDCKYPQKPHKSRSRSSSRSRSRSRERADNPGKYKKKSHYYRDQRRERSRSYERTGRRYERDHPVAAL

SEQ ID NO: 241 - protein, 91 aa, Homo sapien
PTTTKFAAASTFLNWCCLGFIAFAYSVKSRDRKMVGDVTGAQAYASTAKCLNIWALILGIFMTIGFILLLVFGSVTVYHIMLQIIQEKRGY

SEQ ID NO: 242 - protein, 92 aa, Homo sapien
GQEDGWRRDRGPGLCLHRQVPEHLGPDFGHLHDRIHPVTGIRLCDSLPYYVTDNTGKTGLLVAAHSLQPLHSTVQCWPCTLGLLPLPPWSCP

SEQ ID NO: 243 - protein, 137 aa, Homo sapien
MLERRSVMDRPPAEVRETKIKGKSGRFFTVKLPVALDPGAKISVIVETVYTHVLHPYPTQITQSEKQFVVFEGNHYFYSPYPTKTQTMRVKLASRNVESYTKLGNPTRSEDLLDYGPFRDVPAYSQDTFKVPRPRPR

SEQ ID NO: 244 - protein, 148 aa, Homo sapien
  MISC_FEATURE (21)..(22): X=any amino acid
  MISC_FEATURE (24)..(24): X=any amino acid
RLIYRAIGHLIMLERRSVMDXXPXEVRETKIKGKSGRFFTVKLPVALDPGAKISVIVETVYTHVLHPYPTQITQSEKQFVVFEGNHYFYSPYPTKTQTMRVKLASRNVESYTKLGNPTRSEDLLDYGPFRDVPAYSQDTFKVPRPRPR

SEQ ID NO: 245 - protein, 479 aa, Homo sapien
MEAPAAGLFLLLLLGTWAPAPGSASSEAPPLINEDVKRTVDLSSHLAKVTAEVVLAHLGGGSTSRATSFLLALEPELEARLAHLGVQVKGEDEEENNLEVRETKIKGKSGRFFTVKLPVALDPGAKISVIVETVYTHVLHPYPTQITQSEKQFVVFEGNHYFYSPYPTKTQTMRVKLASRNVESYTKLGNPTRSEDLLDYGPFRDVPAYSQDTFKVHYENNSPFLTITSMTRVIEVSHWGNIAVEENVDLKHTGAVLKGPFSRYDYQRQPDSGISSIRSFKTILPAAAQDVYYRDEIGNVSTSHLLILDDSVEMEIRPRFPLFGGWKTHYIVGYNLPSYEYLYNLGDQYALKMRFVDHVFDEQVIDSLTVKIILPEGAKNIEIDSPYEISRAPDELHYTYLDTFGRPVIVAYKKNLVEQHIQDIVLDAQVKELVLKSAVEAERLVAGKLKKDTYIENEKLISGKRQELVTKIDHILDAL

SEQ ID NO: 246 - protein, 361 aa, Homo sapien
MEAPAAGLFLLLLLGTWAPAPGSASSEAPPLINEDVKRTVDLSSHLAKVTAEVVLAHLGGGSTSRATSFLLALEPELEARLAHLGVQVKGEDEEENNLEVRETKIKGKSGRFFTVKLPVALDPGAKISVIVETVYTHVLHPYPTQITQSEKQFVVFEGNHYFYSPYPTKTQTMRVKLASRNVESYTKLGNPTRSEDLLDYGPFRDVPAYSQDTFKVHYENNSPFLTITSMTRVIEVSHWGNIAVEENVDLKHTGAVLKGPFSRYDYQRQPDSGISSIRSFKTILPAAAQDVYYRDEIGNVSTSHLLILDDSVEMEIRPRFPLFGGWKTHYIVGYNLPSYEYLYNLGQSSIVREKLTFSLIS

SEQ ID NO: 247 - protein, 420 aa, Homo sapien
MEAPAAGLFLLLLLGTWAPAPGSASSEAPPLINEDVKRTVDLSSHLAKVTAEVVLAHLGGGSTSRATSFLLALEPELEARLAHLGVQVKGEDEEENNLEVRETKIKGKSGRFFTVKLPVALDPGAKISVIVETVYTHVLHPYPTQITQSEKQFVVFEGNHYFYSPYPTKTQTMRVKLASRNVESYTKLGNPTRSEDLLDYGPFRDVPAYSQDTFKVHYENNSPFLTITSMTRVIEVSHWGNIAVEENVDLKHTGAVLKGPFSRYDYQRQPDSGISSIRSFKTILPAAAQDVYYRDEIGNVSTSHLLILDDSVEMEIRPRFPLFGGWKTHYIVGYNLPSYEYLYNLGDQYALKMRFVDHVFDEQVIDSLTVKIILPEGAKTTSWMPCSPCPHPPGGPGCLHFAVAGRLGGSGRLCMEASES

SEQ ID NO: 248 - protein, 128 aa, Homo sapien
GCAREPESRLPKLGSWENLGPGLTEKRRGKEAGQEEGAWRTPAGGRGAAGLSVTPLSPPRPAPPAGEGPRCPPGRPAPARRRKGWRVERRGGRGSAWDAPGHRARSLRPGAGQVRGQDVGRTWCMAAS

SEQ ID NO: 249 - protein, 315 aa, Homo sapien
MSAAGAGAGVEAGFSSEELLSLRFPLHRACRDGDLATLCSLLQQTPHAHLASEDSFYGWTPVHWAAHFGKLECLVQLVRAGATLNVSTTRYAQTPAHIAAFGGHPQCLVWLIQAGANINKPDCEGETPIHKAARSGSLECISALVANGAHVDLRNASGLTAADIAQTQGFQECAQFLLNLQNCHLNHFYNNGILNGGHQNVFPNHISVGTNRKRCLEDSEDFGVKKARTEAQSLDSAVPLTNGDTEDDADKMHVDREFAVVTGGSGQFPVSCNNNPMVEDTKQQESGSVGPKEIEIYTVSAMQTPCRCRNQYEKQ

SEQ ID NO: 250 - protein, 142 aa, Homo sapien [sequence omitted]

SEQ ID NO: 251 - protein, 72 aa, Homo sapien [sequence omitted]

SEQ ID NO: 252 - protein, 122 aa, Homo sapien
TGLEARGAPPDAGAPPCSACGRAHALGSSVGQDCLEATLARQDYAITDQSEQGQETGLTARVAGTDVWDLAATLCFSPALNLLHFPLVLPDPLHSFRLLNHSACCWNISGFRSTGGRRWLTE

SEQ ID NO: 253 - protein, 42 aa, Homo sapien
MAKKAGLCLGGSRQGGCQSGMVTGNEPRDLALSHPLSFVGGL

SEQ ID NO: 254 - protein, 260 aa, Homo sapien
VFCSFFAEKEQQEAIEHIDEVQNEIDRLNEQASEEILKVEQKYNKLRQPFFQKRSELIAKIPNFWVTTFVNHPQVSALLGEEDEEALHYLTRVEVTEFEDIKSGYRIDFYFDENPYFENKVLSKEFHLNESGDPSSKSTEIKWKSGKDLTKRSSQTQNKASRKRQHEEPESFFTWFTDHSDAGADELGEVIKDDIWPNPLQYYLVPDMDDEEGEGEEDDDDDEEEEGLEDIDEEGDEDEGEEDEDDDEGEEGEEDEGEDD

SEQ ID NO: 255 - protein, 285 aa, Homo sapien
SLQDKRAPIPEHTPFSSSPFCASLLSDLIVAPKKEQQEAIEHIDEVQNEIDRLNEQASEEILKVEQKYNKLRQPFFQKRSELIAKIPNFWVTTFVNHPQVSALLGEEDEEALHYLTRVEVTEFEDIKSGYRIDFYFDENPYFENKVLSKEFHLNESGDPSSKSTEIKWKSGKDLTKRSSQTQNKASRKRQHEEPESFFTWFTDHSDAGADELGEVIKDDIWPNPLQYYLVPDMDDEEGEGEEDDDDDEEEEGLEDIDEEGDEDEGEEDEDDDEGEEGEEDEGEDD

SEQ ID NO: 256 - protein, 600 aa, Homo sapien
MATPLPGRAGGPATPLSPTRLSRLQEKEELRELNDRLAHYIDRVRALELENDRLLLKISEKEEVTTREVSGIKALYESELADARRVLDETARERARLQIEIGKLRAELDEVNKSAKKREGELTVAQGRVKDLESLFHRSEVELAAALSDKRGLESDVAELRAQLAKAEDGHAVAKKQLEKETLMRVDLENRCQSLQEELDFRKSVFEEEVRETRRRHERRLVEVDSSRQQEYDFKMAQALEELRSQHDEQVRLYKLELEQTYQAKLDSAKLSSDQNDKAASAAREELKEARMRLESLSYQLSGLQKQASAAEDRIRELEEAMAGERDKFRKMLDAKEQEMTEMRDVMQQQLAEYQELLDVKLALDMEINAYRKLLEGEEERLKLSPSPSSRVTVSRATSSSSGSLSATGRLGRSKRKRLEVEEPLGSGPSVLGTGTGGSGGFHLAQQASASGSVSIEEIDLEGKFVQLKNNSDKDQSLGNWRIKRQVLEGEEIAYKFTPKYILRAGQMVTVWAAGAGVAHSPPSTLVWKGQSSWGTGESFRTVLVNADGEEVAMRTVKKSSVMRENENGEEEEEEAEFGEEDLFHQQGDPRTTSRGCYVM

SEQ ID NO: 257 - protein, 620 aa, Homo sapien
MSPPSPGRRREQRRPRAAATMATPLPGRAGGPATPLSPTRLSRLQEKEELRELNDRLAHYIDRVRALELENDRLLLKISEKEEVTTREVSGIKALYESELADARRVLDETARERARLQIEIGKLRAELDEVNKSAKKREGELTVAQGRVKDLESLFHRSEVELAAALSDKRGLESDVAELRAQLAKAEDGHAVAKKQLEKETLMRVDLENRCQSLQEELDFRKSVFEEEVRETRRRHERRLVEVDSSRQQEYDFKMAQALEELRSQHDEQVRLYKLELEQTYQAKLDSAKLSSDQNDKAASAAREELKEARMRLESLSYQLSGLQKQASAAEDRIRELEEAMAGERDKFRKMLDAKEQEMTEMRDVMQQQLAEYQELLDVKLALDMEINAYRKLLEGEEERLKLSPSPSSRVTVSRATSSSSGSLSATGRLGRSKRKRLEVEEPLGSGPSVLGTGTGGSGGFHLAQQASASGSVSIEEIDLEGKFVQLKNNSDKDQSLGNWRIKRQVLEGEEIAYKFTPKYILRAGQMVTVWAAGAGVAHSPPSTLVWKGQSSWGTGESFRTVLVNADGEEVAMRTVKKSSVMRENENGEEEEEEAEFGEEDLFHQQGDPRTTSRGCYVM

SEQ ID NO: 258 - protein, 237 aa, Homo sapien
MSPPSPGRRREQRRPRAAATMATPLPGRAGGPATPLSPTRLSRLQEKEELRELNDRLAHYIDRVRALELENDRLLLKISEKEEVTTREVSGIKALYESELADARRVLDETARERARLQIEIGKLRAELDEVNKSAKKREGELTVAQGRVKDLESLFHRSEVELAAALSDKRGLESDVAELRAQLAKAEDGHAVAKKQLEKGCPCSQKSRSHVDRGGRILPKHFLLEATPLCSQSGGW

SEQ ID NO: 259 - protein, 620 aa, Homo sapien; identical to SEQ ID NO: 257
